(19) United States
(12) Patent Application Publication
(10) Pub. No.: US 2006/0024301 A1
(43) Pub. Date: Feb. 2, 2006

(54) Prostate-specific polypeptides and fusion polypeptides thereof

(75) Inventors: Jiangchun Xu, Bellevue, WA (US); Davin C. Dillon, Issaquah, WA (US); Jennifer L. Mitcham, Redmond, WA (US); Susan L. Harlocker, Fremont, CA (US); Yuqiu Jiang, San Diego, CA (US); Steven G. Reed, Bellevue, WA (US); Michael D. Kalos, Duarte, CA (US); Gary R. Fanger, Mill Creek, WA (US); Marc W. Retter, Carnation, WA (US); John A. Stolk, Bothell, WA (US); Craig H. Day, Shoreline, WA (US); Thomas S. Vedvick, Federal Way, WA (US); Darrick Carter, Seattle, WA (US); Samuel X. Li, Redmond, WA (US); Aijun Wang, Issaquah, WA (US); Yasir A. W. Skeiky, Silver Spring, MD (US)

Correspondence Address: SEED INTELLECTUAL PROPERTY LAW GROUP PLLC, 701 FIFTH AVE, SUITE 6300, SEATTLE, WA, 98104-7092, US

(73) Assignee: Corixa Corporation, Seattle, WA (US)

(21) Appl. No.: 11/234,786

(22) Filed: Sep. 23, 2005

Related U.S. Application Data
(63) Continuation of application No. 09/568,100, filed on May 9, 2000.
Application No. 09/568,100 is a continuation-in-part of application No. 09/536,857, filed on Mar. 27, 2000, now abandoned.
Application No. 09/536,857 is a continuation-in-part of application No. 09/483,672, filed on Jan. 14, 2000, now abandoned.
Application No. 09/483,672 is a continuation-in-part of application No. 09/443,686, filed on Nov. 18, 1999, now abandoned.
Application No. 09/443,686 is a continuation-in-part of application No. 09/439,313, filed on Nov. 12, 1999, now Pat. No. 6,329,505.
Application No. 09/439,313 is a continuation-in-part of application No. 09/352,616, filed on Jul. 13, 1999, now Pat. No. 6,395,278.
Application No. 09/352,616 is a continuation-in-part of application No. 09/288,946, filed on Apr. 9, 1999, now abandoned.
Application No. 09/288,946 is a continuation-in-part of application No. 09/232,149, filed on Jan. 15, 1999, now Pat. No. 6,465,611.
Application No. 09/232,149 is a continuation-in-part of application No. 09/159,812, filed on Sep. 23, 1998, now Pat. No. 6,613,872.
Application No. 09/159,812 is a continuation-in-part of application No. 09/115,453, filed on Jul. 14, 1998, now Pat. No. 6,657,056.
Application No. 09/115,453 is a continuation-in-part of application No. 09/030,607, filed on Feb. 25, 1998, now Pat. No. 6,262,245.
Application No. 09/030,607 is a continuation-in-part of application No. 09/020,956, filed on Feb. 9, 1998, now Pat. No. 6,261,562.
Application No. 09/020,956 is a continuation-in-part of application No. 08/904,804, filed on Aug. 1, 1997, now abandoned.
Application No. 08/904,804 is a continuation-in-part of application No. 08/806,099, filed on Feb. 25, 1997, now abandoned.

(51) Int. Cl. C12Q 1/68; C07H 21/04; C12P 21/06; C07K 16/30; C07K 14/82; A61K 39/00; A61K 39/395

(52) U.S. Cl. 424/140.1; 435/6; 435/69.1; 435/320.1; 435/325; 530/350; 536/23.5

(57) ABSTRACT

Compositions and methods for the therapy and diagnosis of cancer, such as prostate cancer, are disclosed. Compositions may comprise one or more prostate-specific proteins, immunogenic portions thereof, or polynucleotides that encode such portions. Alternatively, a therapeutic composition may comprise an antigen presenting cell that expresses a prostate-specific protein, or a T cell that is specific for cells expressing such a protein. Such compositions may be used, for example, for the prevention and treatment of diseases such as prostate cancer. Diagnostic methods based on detecting a prostate-specific protein, or mRNA encoding such a protein, in a sample are also provided.

### CROSS REFERENCE TO RELATED APPLICATIONS

[0001] This application is a continuation of U.S. patent application Ser. No. 09/568,100, filed May 9, 2000, which is a continuation-in-part of U.S. patent application Ser. No. 09/536,857, filed Mar. 27, 2000, now abandoned, which is a continuation-in-part of U.S. patent application Ser. No. 09/483,672, filed Jan. 14, 2000, which is a continuation-in-part of U.S. patent application Ser. No. 09/443,686, filed Nov. 18, 1999, now abandoned, which is a continuation-in-part of U.S. patent application Ser. No. 09/439,313, filed Nov. 12, 1999, now U.S. Pat. No. 6,329,505, which is a continuation-in-part of U.S. patent application Ser. No. 09/352,616, filed Jul. 13, 1999, now U.S. Pat. No. 6,395,278, which is a continuation-in-part of U.S. patent application Ser. No. 09/288,946, filed Apr. 9, 1999, now abandoned, which is a continuation-in-part of U.S. patent application Ser. No. 09/232,149, filed Jan. 15, 1999, now U.S. Pat. No. 6,465,611, which is a continuation-in-part of U.S. patent application Ser. No. 09/159,812, filed Sep. 23, 1998, which is a continuation-in-part of U.S. patent application Ser. No. 09/115,453, filed Jul. 14, 1998, which is a continuation-in-part of U.S. patent application Ser. No. 09/030,607, filed Feb. 25, 1998, now U.S. Pat. No. 6,262,245, which is a continuation-in-part of U.S. patent application Ser. No. 09/020,956, filed Feb. 9, 1998, now U.S. Pat. No. 6,261,562, which is a continuation-in-part of U.S. patent application Ser. No. 08/904,804, filed Aug. 1, 1997, now abandoned, which is a continuation-in-part of U.S. patent application Ser. No. 08/806,099, filed Feb. 25, 1997, now abandoned.

### STATEMENT REGARDING SEQUENCE LISTING SUBMITTED ON CD-ROM

[0002] The Sequence Listing associated with this application is provided on CD-ROM in lieu of a paper copy, and is hereby incorporated by reference into the application. Three CD-ROMs are provided, each containing identical copies of the sequence listing: CD-ROM No. 1 is labeled COPY 1 and contains the file 427c31.app.txt which is 688 KB and created on Sep. 23, 2005; CD-ROM No. 2 is labeled COPY 2 and contains the file 427c31.app.txt which is 688 KB and created on Sep. 23, 2005; CD-ROM No. 3 is labeled CRF (Computer Readable Form) and contains the file 427c31.app.txt which is 688 KB and created on Sep. 23, 2005.

### TECHNICAL FIELD

[0003] The present invention relates generally to therapy and diagnosis of cancer, such as prostate cancer. The invention is more specifically related to polypeptides comprising at least a portion of a prostate-specific protein, and to polynucleotides encoding such polypeptides. Such polypeptides and polynucleotides may be used in vaccines and pharmaceutical compositions for prevention and treatment of prostate cancer, and for the diagnosis and monitoring of such cancers.

### BACKGROUND OF THE INVENTION

[0004] Prostate cancer is the most common form of cancer among males, with an estimated incidence of 30% in men over the age of 50. Overwhelming clinical evidence shows that human prostate cancer has the propensity to metastasize to bone, and the disease appears to progress inevitably from androgen dependent to androgen refractory status, leading to increased patient mortality. This prevalent disease is currently the second leading cause of cancer death among men in the U.S.

[0005] In spite of considerable research into therapies for the disease, prostate cancer remains difficult to treat. Commonly, treatment is based on surgery and/or radiation therapy, but these methods are ineffective in a significant percentage of cases. Two previously identified prostate specific proteins—prostate specific antigen (PSA) and prostatic acid phosphatase (PAP)—have limited therapeutic and diagnostic potential. For example, PSA levels do not always correlate well with the presence of prostate cancer, being positive in a percentage of non-prostate cancer cases, including benign prostatic hyperplasia (BPH). Furthermore, PSA measurements correlate with prostate volume, and do not indicate the level of metastasis.

[0006] In spite of considerable research into therapies for these and other cancers, prostate cancer remains difficult to diagnose and treat effectively. Accordingly, there is a need in the art for improved methods for detecting and treating such cancers. The present invention fulfills these needs and further provides other related advantages.

### SUMMARY OF THE INVENTION

[0007] Briefly stated, the present invention provides compositions and methods for the diagnosis and therapy of cancer, such as prostate cancer. In one aspect, the present invention provides polypeptides comprising at least a portion of a prostate-specific protein, or a variant thereof. Certain portions and other variants are immunogenic, such that the ability of the variant to react with antigen-specific antisera is not substantially diminished. Within certain embodiments, the polypeptide comprises at least an immunogenic portion of a prostate-specific protein, or a variant thereof, wherein the protein comprises an amino acid sequence that is encoded by a polynucleotide sequence selected from the group consisting of: (a) sequences recited in any one of SEQ ID NOs: 1-111, 115-171, 173-175, 177, 179-305, 307-315, 326, 328, 330, 332-335, 340-375, 381, 382 and 384-476, 524, 526, 530, 531, 533, 535, 536, 552, 569-572, 587, 591, 593-606, 618-689 and 690-705; (b) sequences that hybridize to any of the foregoing sequences under moderately stringent conditions; and (c) complements of any of the sequence of (a) or (b). In certain specific embodiments, such a polypeptide comprises at least a portion, or variant thereof, of a protein that includes an amino acid sequence selected from the group consisting of sequences recited in any one of SEQ ID NO: 112-114, 172, 176, 178, 327, 329, 331, 336, 339, 376-380, 383, 477-483, 496, 504, 505, 519, 520, 522, 525, 527, 532, 534, 537-551, 553-568, 573-586, 588-590, 592 and 706-708.

[0008] The present invention further provides polynucleotides that encode a polypeptide as described above, or a portion thereof (such as a portion encoding at least 15 amino acid residues of a prostate-specific protein), expression vectors comprising such polynucleotides and host cells transformed or transfected with such expression vectors.

[0009] Within other aspects, the present invention provides pharmaceutical compositions comprising a polypeptide or polynucleotide as described above and a physiologically acceptable carrier.

[0010] Within a related aspect of the present invention, vaccines for prophylactic or therapeutic use are provided. Such vaccines comprise a polypeptide or polynucleotide as described above and an immunostimulant.

[0011] The present invention further provides pharmaceutical compositions that comprise: (a) an antibody or antigen-binding fragment thereof that specifically binds to a prostate-specific protein; and (b) a physiologically acceptable carrier. In certain embodiments, the present invention provides monoclonal antibodies that specifically bind to an amino acid sequence selected from the group consisting of SEQ ID NO: 496, 504, 505, 509-517, 522 and 541-551, together with monoclonal antibodies comprising a complementarity determining region selected from the group consisting of SEQ ID NO: 502, 503 and 506-508.

[0012] Within further aspects, the present invention provides pharmaceutical compositions comprising: (a) an antigen presenting cell that expresses a polypeptide as described above and (b) a pharmaceutically acceptable carrier or excipient. Antigen presenting cells include dendritic cells, macrophages, monocytes, fibroblasts and B cells.

[0013] Within related aspects, vaccines are provided that comprise: (a) an antigen presenting cell that expresses a polypeptide as described above and (b) an immunostimulant.

[0014] The present invention further provides, in other aspects, fusion proteins that comprise at least one polypeptide as described above, as well as polynucleotides encoding such fusion proteins.

[0015] Within related aspects, pharmaceutical compositions comprising a fusion protein, or a polynucleotide encoding a fusion protein, in combination with a physiologically acceptable carrier are provided.

[0016] Vaccines are further provided, within other aspects, that comprise a fusion protein, or a polynucleotide encoding a fusion protein, in combination with an immunostimulant.

[0017] Within further aspects, the present invention provides methods for inhibiting the development of a cancer in a patient, comprising administering to a patient a pharmaceutical composition or vaccine as recited above.

[0018] The present invention further provides, within other aspects, methods for removing tumor cells from a biological sample, comprising contacting a biological sample with T cells that specifically react with a prostate-specific protein, wherein the step of contacting is performed under conditions and for a time sufficient to permit the removal of cells expressing the protein from the sample.

[0019] Within related aspects, methods are provided for inhibiting the development of a cancer in a patient, comprising administering to a patient a biological sample treated as described above.

[0020] Methods are further provided, within other aspects, for stimulating and/or expanding T cells specific for a prostate-specific protein, comprising contacting T cells with one or more of: (i) a polypeptide as described above; (ii) a polynucleotide encoding such a polypeptide; and/or (iii) an antigen presenting cell that expresses such a polypeptide; under conditions and for a time sufficient to permit the stimulation and/or expansion of T cells. Isolated T cell populations comprising T cells prepared as described above are also provided.

[0021] Within further aspects, the present invention provides methods for inhibiting the development of a cancer in a patient, comprising administering to a patient an effective amount of a T cell population as described above.

[0022] The present invention further provides methods for inhibiting the development of a cancer in a patient, comprising the steps of: (a) incubating CD4⁺ and/or CD8⁺ T cells isolated from a patient with one or more of: (i) a polypeptide comprising at least an immunogenic portion of a prostate-specific protein; (ii) a polynucleotide encoding such a polypeptide; and (iii) an antigen-presenting cell that expressed such a polypeptide; and (b) administering to the patient an effective amount of the proliferated T cells, and thereby inhibiting the development of a cancer in the patient. Proliferated cells may, but need not, be cloned prior to administration to the patient.

[0023] Within further aspects, the present invention provides methods for determining the presence or absence of a cancer in a patient, comprising: (a) contacting a biological sample obtained from a patient with a binding agent that binds to a polypeptide as recited above; (b) detecting in the sample an amount of polypeptide that binds to the binding agent; and (c) comparing the amount of polypeptide with a predetermined cut-off value, and therefrom determining the presence or absence of a cancer in the patient.

[0024] Within preferred embodiments, the binding agent is an antibody, more preferably a monoclonal antibody. The cancer may be prostate cancer. The present invention also provides, within other aspects, methods for monitoring the progression of a cancer in a patient. Such methods comprise the steps of: (a) contacting a biological sample obtained from a patient at a first point in time with a binding agent that binds to a polypeptide as recited above; (b) detecting in the sample an amount of polypeptide that binds to the binding agent; (c) repeating steps (a) and (b) using a biological sample obtained from the patient at a subsequent point in time; and (d) comparing the amount of polypeptide detected in step (c) with the amount detected in step (b) and therefrom monitoring the progression of the cancer in the patient.

[0025] The present invention further provides, within other aspects, methods for determining the presence or absence of a cancer in a patient, comprising the steps of: (a) contacting a biological sample obtained from a patient with an oligonucleotide that hybridizes to a polynucleotide that encodes a prostate-specific protein; (b) detecting in the sample a level of a polynucleotide, preferably mRNA, that hybridizes to the oligonucleotide; and (c) comparing the level of polynucleotide that hybridizes to the oligonucleotide with a predetermined cut-off value, and therefrom determining the presence or absence of a cancer in the patient. Within certain embodiments, the amount of mRNA is detected via polymerase chain reaction using, for example, at least one oligonucleotide primer that hybridizes to a polynucleotide encoding a polypeptide as recited above, or a complement of such a polynucleotide. Within other embodiments, the amount of mRNA is detected using a hybridization technique, employing an oligonucleotide probe that hybridizes to a polynucleotide that encodes a polypeptide as recited above, or a complement of such a polynucleotide.

[0026] In related aspects, methods are provided for monitoring the progression of a cancer in a patient, comprising the steps of: (a) contacting a biological sample obtained from a patient with an oligonucleotide that hybridizes to a polynucleotide that encodes a prostate-specific protein; (b) detecting in the sample an amount of a polynucleotide that hybridizes to the oligonucleotide; (c) repeating steps (a) and (b) using a biological sample obtained from the patient at a subsequent point in time; and (d) comparing the amount of polynucleotide detected in step (c) with the amount detected in step (b) and therefrom monitoring the progression of the cancer in the patient.

[0027] Within further aspects, the present invention provides antibodies, such as monoclonal antibodies, that bind to a polypeptide as described above, as well as diagnostic kits comprising such antibodies. Diagnostic kits comprising one or more oligonucleotide probes or primers as described above are also provided.

[0028] These and other aspects of the present invention will become apparent upon reference to the following detailed description and attached drawings. All references disclosed herein are hereby incorporated by reference in their entirety as if each was incorporated individually.

### BRIEF DESCRIPTION OF THE DRAWINGS AND SEQUENCE IDENTIFIERS

[0029] FIG. 1 illustrates the ability of T cells to kill fibroblasts expressing the representative prostate-specific polypeptide P502S, as compared to control fibroblasts. The percentage lysis is shown as a series of effector:target ratios, as indicated.

[0030] FIGS. 2A and 2B illustrate the ability of T cells to recognize cells expressing the representative prostate-specific polypeptide P502S. In each case, the number of γ-interferon spots is shown for different numbers of responders. In FIG. 2A, data is presented for fibroblasts pulsed with the P2S-12 peptide, as compared to fibroblasts pulsed with a control E75 peptide. In FIG. 2B, data is presented for fibroblasts expressing P502S, as compared to fibroblasts expressing HER-2/neu.

[0031] FIG. 3 represents a peptide competition binding assay showing that the P1S#10 peptide, derived from P501S, binds HLA-A2. Peptide P1S#10 inhibits HLA-A2 restricted presentation of fluM58 peptide to CTL clone D150M58 in TNF release bioassay. D150M58 CTL is specific for the HLA-A2 binding influenza matrix peptide fluM58.

[0032] FIG. 4 illustrates the ability of T cell lines generated from P1S#10 immunized mice to specifically lyse P1S#10-pulsed Jurkat A2 Kb targets and P501S-transduced Jurkat A2 Kb targets, as compared to EGFP-transduced Jurkat A2 Kb. The percent lysis is shown as a series of effector to target ratios, as indicated.

[0033] FIG. 5 illustrates the ability of a T cell clone to recognize and specifically lyse Jurkat A2 Kb cells expressing the representative prostate-specific polypeptide P501S, thereby demonstrating that the P1S#10 peptide may be a naturally processed epitope of the P501S polypeptide.

[0034] FIGS. 6A and 6B are graphs illustrating the specificity of a CD8⁺ cell line (3A-1) for a representative prostate-specific antigen (P501S). FIG. 6A shows the results of a ⁵¹Cr release assay. The percent specific lysis is shown as a series of effector:target ratios, as indicated. FIG. 6B shows the production of interferon-gamma by 3A-1 cells stimulated with autologous B-LCL transduced with P501S, at varying effector:target rations as indicated.

[0035] FIG. 7 is a Western blot showing the expression of P501S in baculovirus.

[0036] FIG. 8 illustrates the results of epitope mapping studies on P501S.

[0037] FIG. 9 is a schematic representation of the P501S protein showing the location of transmembrane domains and predicted intracellular and extracellular domains.

[0038] FIG. 10 is a genomic map showing the location of the prostate genes P775P, P704P, B305D, P712P and P774P within the Cat Eye Syndrome region of chromosome 22q11.2

[0039] FIG. 11 shows the results of an ELISA assay to determine the specificity of rabbit polyclonal antisera raised against P501S.

[0040] FIGS. 12A(1), 12A(2), 12A(3), and B are the full-length cDNA (SEQ ID NO:591) and predicted amino acid (SEQ ID NO:592) sequences, respectively, for the clone P788P.

[0041] SEQ ID NO: 1 is the determined cDNA sequence for F1-13

[0042] SEQ ID NO: 2 is the determined 3′ cDNA sequence for F1-12

[0043] SEQ ID NO: 3 is the determined 5′ cDNA sequence for F1-12

[0044] SEQ ID NO: 4 is the determined 3′ cDNA sequence for F1-16

[0045] SEQ ID NO: 5 is the determined 3′ cDNA sequence for H1-1

[0046] SEQ ID NO: 6 is the determined 3′ cDNA sequence for H1-9

[0047] SEQ ID NO: 7 is the determined 3′ cDNA sequence for H1-4

[0048] SEQ ID NO: 8 is the determined 3′ cDNA sequence for J1-17

[0049] SEQ ID NO: 9 is the determined 5′ cDNA sequence for J1-17

[0050] SEQ ID NO: 10 is the determined 3′ cDNA sequence for L1-12

[0051] SEQ ID NO: 11 is the determined 5′ cDNA sequence for L1-12

[0052] SEQ ID NO: 12 is the determined 3′ cDNA sequence for N1-1862

[0053] SEQ ID NO: 13 is the determined 5′ cDNA sequence for N1-1862

[0054] SEQ ID NO: 14 is the determined 3′ cDNA sequence for J1-13

[0055] SEQ ID NO: 15 is the determined 5′ cDNA sequence for J1-13

[0056] SEQ ID NO: 16 is the determined 3′ cDNA sequence for J1-19

[0057] SEQ ID NO: 17 is the determined 5′ cDNA sequence for J1-19

[0058] SEQ ID NO: 18 is the determined 3′ cDNA sequence for J1-25

[0059] SEQ ID NO: 19 is the determined 5′ cDNA sequence for J1-25

[0060] SEQ ID NO: 20 is the determined 5′ cDNA sequence for J1-24

[0061] SEQ ID NO: 21 is the determined 3′ cDNA sequence for J1-24

[0062] SEQ ID NO: 22 is the determined 5′ cDNA sequence for K1-58

[0063] SEQ ID NO: 23 is the determined 3′ cDNA sequence for K1-58

[0064] SEQ ID NO: 24 is the determined 5′ cDNA sequence for K1-63

[0065] SEQ ID NO: 25 is the determined 3′ cDNA sequence for K1-63

[0066] SEQ ID NO: 26 is the determined 5′ cDNA sequence for L1-4

[0067] SEQ ID NO: 27 is the determined 3′ cDNA sequence for L1-4

[0068] SEQ ID NO: 28 is the determined 5′ cDNA sequence for L1-14

[0069] SEQ ID NO: 29 is the determined 3′ cDNA sequence for L1-14

[0070] SEQ ID NO: 30 is the determined 3′ cDNA sequence for J1-12

[0071] SEQ ID NO: 31 is the determined 3′ cDNA sequence for J1-16

[0072] SEQ ID NO: 32 is the determined 3′ cDNA sequence for J1-21

[0073] SEQ ID NO: 33 is the determined 3′ cDNA sequence for K1-48

[0074] SEQ ID NO: 34 is the determined 3′ cDNA sequence for K1-55

[0075] SEQ ID NO: 35 is the determined 3′ cDNA sequence for L1-2

[0076] SEQ ID NO: 36 is the determined 3′ cDNA sequence for L1-6

[0077] SEQ ID NO: 37 is the determined 3′ cDNA sequence for N1-1858

[0078] SEQ ID NO: 38 is the determined 3′ cDNA sequence for N1-1860

[0079] SEQ ID NO: 39 is the determined 3′ cDNA sequence for N1-1861

[0080] SEQ ID NO: 40 is the determined 3′ cDNA sequence for N1-1864

[0081] SEQ ID NO: 41 is the determined cDNA sequence for P5

[0082] SEQ ID NO: 42 is the determined cDNA sequence for P8

[0083] SEQ ID NO: 43 is the determined cDNA sequence for P9

[0084] SEQ ID NO: 44 is the determined cDNA sequence for P18

[0085] SEQ ID NO: 45 is the determined cDNA sequence for P20

[0086] SEQ ID NO: 46 is the determined cDNA sequence for P29

[0087] SEQ ID NO: 47 is the determined cDNA sequence for P30

[0088] SEQ ID NO: 48 is the determined cDNA sequence for P34

[0089] SEQ ID NO: 49 is the determined cDNA sequence for P36

[0090] SEQ ID NO: 50 is the determined cDNA sequence for P38

[0091] SEQ ID NO: 51 is the determined cDNA sequence for P39

[0092] SEQ ID NO: 52 is the determined cDNA sequence for P42

[0093] SEQ ID NO: 53 is the determined cDNA sequence for P47

[0094] SEQ ID NO: 54 is the determined cDNA sequence for P49

[0095] SEQ ID NO: 55 is the determined cDNA sequence for P50

[0096] SEQ ID NO: 56 is the determined cDNA sequence for P53

[0097] SEQ ID NO: 57 is the determined cDNA sequence for P55

[0098] SEQ ID NO: 58 is the determined cDNA sequence for P60

[0099] SEQ ID NO: 59 is the determined cDNA sequence for P64

[0100] SEQ ID NO: 60 is the determined cDNA sequence for P65

[0101] SEQ ID NO: 61 is the determined cDNA sequence for P73

[0102] SEQ ID NO: 62 is the determined cDNA sequence for P75

[0103] SEQ ID NO: 63 is the determined cDNA sequence for P76

[0104] SEQ ID NO: 64 is the determined cDNA sequence for P79

[0105] SEQ ID NO: 65 is the determined cDNA sequence for P84

[0106] SEQ ID NO: 66 is the determined cDNA sequence for P68

[0107] SEQ ID NO: 67 is the determined cDNA sequence for P80 (also referred to as P704P)

[0108] SEQ ID NO: 68 is the determined cDNA sequence for P82

[0109] SEQ ID NO: 69 is the determined cDNA sequence for U1-3064

[0110] SEQ ID NO: 70 is the determined cDNA sequence for U1-3065

[0111] SEQ ID NO: 71 is the determined cDNA sequence for V1-3692

[0112] SEQ ID NO: 72 is the determined cDNA sequence for 1A-3905

[0113] SEQ ID NO: 73 is the determined cDNA sequence for V1-3686

[0114] SEQ ID NO: 74 is the determined cDNA sequence for R1-2330

[0115] SEQ ID NO: 75 is the determined cDNA sequence for 1B-3976

[0116] SEQ ID NO: 76 is the determined cDNA sequence for V1-3679

[0117] SEQ ID NO: 77 is the determined cDNA sequence for 1G-4736

[0118] SEQ ID NO: 78 is the determined cDNA sequence for 1G-4738

[0119] SEQ ID NO: 79 is the determined cDNA sequence for 1G-4741

[0120] SEQ ID NO: 80 is the determined cDNA sequence for 1G-4744

[0121] SEQ ID NO: 81 is the determined cDNA sequence for 1G-4734

[0122] SEQ ID NO: 82 is the determined cDNA sequence for 1H-4774

[0123] SEQ ID NO: 83 is the determined cDNA sequence for 1H-4781

[0124] SEQ ID NO: 84 is the determined cDNA sequence for 1H-4785

[0125] SEQ ID NO: 85 is the determined cDNA sequence for 1H-4787

[0126] SEQ ID NO: 86 is the determined cDNA sequence for 1H-4796

[0127] SEQ ID NO: 87 is the determined cDNA sequence for 1I-4807

[0128] SEQ ID NO: 88 is the determined cDNA sequence for 1I-4810

[0129] SEQ ID NO: 89 is the determined cDNA sequence for 1I-4811

[0130] SEQ ID NO: 90 is the determined cDNA sequence for 1J-4876

[0131] SEQ ID NO: 91 is the determined cDNA sequence for 1K-4884

[0132] SEQ ID NO: 92 is the determined cDNA sequence for 1K-4896

[0133] SEQ ID NO: 93 is the determined cDNA sequence for 1G-4761

[0134] SEQ ID NO: 94 is the determined cDNA sequence for 1G-4762

[0135] SEQ ID NO: 95 is the determined cDNA sequence for 1H-4766

[0136] SEQ ID NO: 96 is the determined cDNA sequence for 1H-4770

[0137] SEQ ID NO: 97 is the determined cDNA sequence for 1H-4771

[0138] SEQ ID NO: 98 is the determined cDNA sequence for 1H-4772

[0139] SEQ ID NO: 99 is the determined cDNA sequence for 1D-4297

[0140] SEQ ID NO: 100 is the determined cDNA sequence for 1D-4309

[0141] SEQ ID NO: 101 is the determined cDNA sequence for 1D.1-4278

[0142] SEQ ID NO: 102 is the determined cDNA sequence for 1D-4288

[0143] SEQ ID NO: 103 is the determined cDNA sequence for 1D-4283

[0144] SEQ ID NO: 104 is the determined cDNA sequence for 1D-4304

[0145] SEQ ID NO: 105 is the determined cDNA sequence for 1D-4296

[0146] SEQ ID NO: 106 is the determined cDNA sequence for 1D-4280

[0147] SEQ ID NO: 107 is the determined full length cDNA sequence for F1-12 (also referred to as P504S)

[0148] SEQ ID NO: 108 is the predicted amino acid sequence for F1-12

[0149] SEQ ID NO: 109 is the determined full length cDNA sequence for J1-17

[0150] SEQ ID NO: 110 is the determined full length cDNA sequence for L1-12 (also referred to as P501S)

[0151] SEQ ID NO: 111 is the determined full length cDNA sequence for N1-1862 (also referred to as P503S)

[0152] SEQ ID NO: 112 is the predicted amino acid sequence for J1-17

[0153] SEQ ID NO: 113 is the predicted amino acid sequence for L1-12 (also referred to as P501S)

[0154] SEQ ID NO: 114 is the predicted amino acid sequence for N1-1862 (also referred to as P503S)

[0155] SEQ ID NO: 115 is the determined cDNA sequence for P89

[0156] SEQ ID NO: 116 is the determined cDNA sequence for P90

[0157] SEQ ID NO: 117 is the determined cDNA sequence for P92

[0158] SEQ ID NO: 118 is the determined cDNA sequence for P95

[0159] SEQ ID NO: 119 is the determined cDNA sequence for P98

[0160] SEQ ID NO: 120 is the determined cDNA sequence for P102

[0161] SEQ ID NO: 121 is the determined cDNA sequence for P110

[0162] SEQ ID NO: 122 is the determined cDNA sequence for P111

[0163] SEQ ID NO: 123 is the determined cDNA sequence for P114

[0164] SEQ ID NO: 124 is the determined cDNA sequence for P115

[0165] SEQ ID NO: 125 is the determined cDNA sequence for P116

[0166] SEQ ID NO: 126 is the determined cDNA sequence for P124

[0167] SEQ ID NO: 127 is the determined cDNA sequence for P126

[0168] SEQ ID NO: 128 is the determined cDNA sequence for P130

[0169] SEQ ID NO: 129 is the determined cDNA sequence for P133

[0170] SEQ ID NO: 130 is the determined cDNA sequence for P138

[0171] SEQ ID NO: 131 is the determined cDNA sequence for P143

[0172] SEQ ID NO: 132 is the determined cDNA sequence for P151

[0173] SEQ ID NO: 133 is the determined cDNA sequence for P156

[0174] SEQ ID NO: 134 is the determined cDNA sequence for P157

[0175] SEQ ID NO: 135 is the determined cDNA sequence for P166

[0176] SEQ ID NO: 136 is the determined cDNA sequence for P176

[0177] SEQ ID NO: 137 is the determined cDNA sequence for P178

[0178] SEQ ID NO: 138 is the determined cDNA sequence for P179

[0179] SEQ ID NO: 139 is the determined cDNA sequence for P185

[0180] SEQ ID NO: 140 is the determined cDNA sequence for P192

[0181] SEQ ID NO: 141 is the determined cDNA sequence for P201

[0182] SEQ ID NO: 142 is the determined cDNA sequence for P204

[0183] SEQ ID NO: 143 is the determined cDNA sequence for P208

[0184] SEQ ID NO: 144 is the determined cDNA sequence for P211

[0185] SEQ ID NO: 145 is the determined cDNA sequence for P213

[0186] SEQ ID NO: 146 is the determined cDNA sequence for P219

[0187] SEQ ID NO: 147 is the determined cDNA sequence for P237

[0188] SEQ ID NO: 148 is the determined cDNA sequence for P239

[0189] SEQ ID NO: 149 is the determined cDNA sequence for P248

[0190] SEQ ID NO: 150 is the determined cDNA sequence for P251

[0191] SEQ ID NO: 151 is the determined cDNA sequence for P255

[0192] SEQ ID NO: 152 is the determined cDNA sequence for P256

[0193] SEQ ID NO: 153 is the determined cDNA sequence for P259

[0194] SEQ ID NO: 154 is the determined cDNA sequence for P260

[0195] SEQ ID NO: 155 is the determined cDNA sequence for P263

[0196] SEQ ID NO: 156 is the determined cDNA sequence for P264

[0197] SEQ ID NO: 157 is the determined cDNA sequence for P266

[0198] SEQ ID NO: 158 is the determined cDNA sequence for P270

[0199] SEQ ID NO: 159 is the determined cDNA sequence for P272

[0200] SEQ ID NO: 160 is the determined cDNA sequence for P278

[0201] SEQ ID NO: 161 is the determined cDNA sequence for P105

[0202] SEQ ID NO: 162 is the determined cDNA sequence for P107

[0203] SEQ ID NO: 163 is the determined cDNA sequence for P137

[0204] SEQ ID NO: 164 is the determined cDNA sequence for P194

[0205] SEQ ID NO: 165 is the determined cDNA sequence for P195

[0206] SEQ ID NO: 166 is the determined cDNA sequence for P196

[0207] SEQ ID NO: 167 is the determined cDNA sequence for P220

[0208] SEQ ID NO: 168 is the determined cDNA sequence for P234

[0209] SEQ ID NO: 169 is the determined cDNA sequence for P235

[0210] SEQ ID NO: 170 is the determined cDNA sequence for P243

[0211] SEQ ID NO: 171 is the determined cDNA sequence for P703P-DE1

[0212] SEQ ID NO: 172 is the predicted amino acid sequence for P703P-DE1

[0213] SEQ ID NO: 173 is the determined cDNA sequence for P703P-DE2

[0214] SEQ ID NO: 174 is the determined cDNA sequence for P703P-DE6

[0215] SEQ ID NO: 175 is the determined cDNA sequence for P703P-DE13

[0216] SEQ ID NO: 176 is the predicted amino acid sequence for P703P-DE13

[0217] SEQ ID NO: 177 is the determined cDNA sequence for P703P-DE14

[0218] SEQ ID NO: 178 is the predicted amino acid sequence for P703P-DE14

[0219] SEQ ID NO: 179 is the determined extended cDNA sequence for 1G-4736

[0220] SEQ ID NO: 180 is the determined extended cDNA sequence for 1G-4738

[0221] SEQ ID NO: 181 is the determined extended cDNA sequence for 1G-4741

[0222] SEQ ID NO: 182 is the determined extended cDNA sequence for 1G-4744

[0223] SEQ ID NO: 183 is the determined extended cDNA sequence for 1H-4774

[0224] SEQ ID NO: 184 is the determined extended cDNA sequence for 1H-4781

[0225] SEQ ID NO: 185 is the determined extended cDNA sequence for 1H-4785

[0226] SEQ ID NO: 186 is the determined extended cDNA sequence for 1H-4787

[0227] SEQ ID NO: 187 is the determined extended cDNA sequence for 1H-4796

[0228] SEQ ID NO: 188 is the determined extended cDNA sequence for 1I-4807

[0229] SEQ ID NO: 189 is the determined 3′ cDNA sequence for 1I-4810

[0230] SEQ ID NO: 190 is the determined 3′ cDNA sequence for 1I-4811

[0231] SEQ ID NO: 191 is the determined extended cDNA sequence for 1J-4876

[0232] SEQ ID NO: 192 is the determined extended cDNA sequence for 1K-4884

[0233] SEQ ID NO: 193 is the determined extended cDNA sequence for 1K-4896

[0234] SEQ ID NO: 194 is the determined extended cDNA sequence for 1G-4761

[0235] SEQ ID NO: 195 is the determined extended cDNA sequence for 1G-4762

[0236] SEQ ID NO: 196 is the determined extended cDNA sequence for 1H-4766

[0237] SEQ ID NO: 197 is the determined 3′ cDNA sequence for 1H-4770

[0238] SEQ ID NO: 198 is the determined 3′ cDNA sequence for 1H-4771

[0239] SEQ ID NO: 199 is the determined extended cDNA sequence for 1H-4772

[0240] SEQ ID NO: 200 is the determined extended cDNA sequence for 1D-4309

[0241] SEQ ID NO: 201 is the determined extended cDNA sequence for 1D.1-4278

[0242] SEQ ID NO: 202 is the determined extended cDNA sequence for 1D-4288

[0243] SEQ ID NO: 203 is the determined extended cDNA sequence for 1D-4283

[0244] SEQ ID NO: 204 is the determined extended cDNA sequence for 1D-4304

[0245] SEQ ID NO: 205 is the determined extended cDNA sequence for 1D-4296

[0246] SEQ ID NO: 206 is the determined extended cDNA sequence for 1D-4280

[0247] SEQ ID NO: 207 is the determined cDNA sequence for 10-d8fwd

[0248] SEQ ID NO: 208 is the determined cDNA sequence for 10-H10con

[0249] SEQ ID NO: 209 is the determined cDNA sequence for 11-C8rev

[0250] SEQ ID NO: 210 is the determined cDNA sequence for 7.g6fwd

[0251] SEQ ID NO: 211 is the determined cDNA sequence for 7.g6rev

[0252] SEQ ID NO: 212 is the determined cDNA sequence for 8-b5fwd

[0253] SEQ ID NO: 213 is the determined cDNA sequence for 8-b5rev

[0254] SEQ ID NO: 214 is the determined cDNA sequence for 8-b6fwd

[0255] SEQ ID NO: 215 is the determined cDNA sequence for 8-b6 rev

[0256] SEQ ID NO: 216 is the determined cDNA sequence for 8-d4fwd

[0257] SEQ ID NO: 217 is the determined cDNA sequence for 8-d9rev

[0258] SEQ ID NO: 218 is the determined cDNA sequence for 8-g3fwd

[0259] SEQ ID NO: 219 is the determined cDNA sequence for 8-g3rev

[0260] SEQ ID NO: 220 is the determined cDNA sequence for 8-h11rev

[0261] SEQ ID NO: 221 is the determined cDNA sequence for g-f12fwd

[0262] SEQ ID NO: 222 is the determined cDNA sequence for g-f3rev

[0263] SEQ ID NO: 223 is the determined cDNA sequence for P509S

[0264] SEQ ID NO: 224 is the determined cDNA sequence for P510S

[0265] SEQ ID NO: 225 is the determined cDNA sequence for P703DE5

[0266] SEQ ID NO: 226 is the determined cDNA sequence for 9-A11

[0267] SEQ ID NO: 227 is the determined cDNA sequence for 8-C6

[0268] SEQ ID NO: 228 is the determined cDNA sequence for 8-H7

[0269] SEQ ID NO: 229 is the determined cDNA sequence for JPTPN13

[0270] SEQ ID NO: 230 is the determined cDNA sequence for JPTPN14

[0271] SEQ ID NO: 231 is the determined cDNA sequence for JPTPN23

[0272] SEQ ID NO: 232 is the determined cDNA sequence for JPTPN24

[0273] SEQ ID NO: 233 is the determined cDNA sequence for JPTPN25

[0274] SEQ ID NO: 234 is the determined cDNA sequence for JPTPN30

[0275] SEQ ID NO: 235 is the determined cDNA sequence for JPTPN34

[0276] SEQ ID NO: 236 is the determined cDNA sequence for PTPN35

[0277] SEQ ID NO: 237 is the determined cDNA sequence for JPTPN36

[0278] SEQ ID NO: 238 is the determined cDNA sequence for JPTPN38

[0279] SEQ ID NO: 239 is the determined cDNA sequence for JPTPN39

[0280] SEQ ID NO: 240 is the determined cDNA sequence for JPTPN40

[0281] SEQ ID NO: 241 is the determined cDNA sequence for JPTPN41

[0282] SEQ ID NO: 242 is the determined cDNA sequence for JPTPN42

[0283] SEQ ID NO: 243 is the determined cDNA sequence for JPTPN45

[0284] SEQ ID NO: 244 is the determined cDNA sequence for JPTPN46

[0285] SEQ ID NO: 245 is the determined cDNA sequence for JPTPN51

[0286] SEQ ID NO: 246 is the determined cDNA sequence for JPTPN56

[0287] SEQ ID NO: 247 is the determined cDNA sequence for PTPN64

[0288] SEQ ID NO: 248 is the determined cDNA sequence for JPTPN65

[0289] SEQ ID NO: 249 is the determined cDNA sequence for JPTPN67

[0290] SEQ ID NO: 250 is the determined cDNA sequence for JPTPN76

[0291] SEQ ID NO: 251 is the determined cDNA sequence for JPTPN84

[0292] SEQ ID NO: 252 is the determined cDNA sequence for JPTPN85

[0293] SEQ ID NO: 253 is the determined cDNA sequence for JPTPN86

[0294] SEQ ID NO: 254 is the determined cDNA sequence for JPTPN87

[0295] SEQ ID NO: 255 is the determined cDNA sequence for JPTPN88

[0296] SEQ ID NO: 256 is the determined cDNA sequence for JP1F1

[0297] SEQ ID NO: 257 is the determined cDNA sequence for JP1F2

[0298] SEQ ID NO: 258 is the determined cDNA sequence for JP1C2

[0299] SEQ ID NO: 259 is the determined cDNA sequence for JP1B1

[0300] SEQ ID NO: 260 is the determined cDNA sequence for JP1B2

[0301] SEQ ID NO: 261 is the determined cDNA sequence for JP1D3

[0302] SEQ ID NO: 262 is the determined cDNA sequence for JP1A4

[0303] SEQ ID NO: 263 is the determined cDNA sequence for JP1F5

[0304] SEQ ID NO: 264 is the determined cDNA sequence for JP1E6

[0305] SEQ ID NO: 265 is the determined cDNA sequence for JP1D6

[0306] SEQ ID NO: 266 is the determined cDNA sequence for JP1B5

[0307] SEQ ID NO: 267 is the determined cDNA sequence for JP1A6

[0308] SEQ ID NO: 268 is the determined cDNA sequence for JP1E8

[0309] SEQ ID NO: 269 is the determined cDNA sequence for JP1D7

[0310] SEQ ID NO: 270 is the determined cDNA sequence for JP1D9

[0311] SEQ ID NO: 271 is the determined cDNA sequence for JP1C10

[0312] SEQ ID NO: 272 is the determined cDNA sequence for JP1A9

[0313] SEQ ID NO: 273 is the determined cDNA sequence for JP1F12

[0314] SEQ ID NO: 274 is the determined cDNA sequence for JP1E12

[0315] SEQ ID NO: 275 is the determined cDNA sequence for JP1D11

[0316] SEQ ID NO: 276 is the determined cDNA sequence for JP1C11

[0317] SEQ ID NO: 277 is the determined cDNA sequence for JP1C12

[0318] SEQ ID NO: 278 is the determined cDNA sequence for JP1B12

[0319] SEQ ID NO: 279 is the determined cDNA sequence for JP1A12

[0320] SEQ ID NO: 280 is the determined cDNA sequence for JP8G2

[0321] SEQ ID NO: 281 is the determined cDNA sequence for JP8H1

[0322] SEQ ID NO: 282 is the determined cDNA sequence for JP8H2

[0323] SEQ ID NO: 283 is the determined cDNA sequence for JP8A3

[0324] SEQ ID NO: 284 is the determined cDNA sequence for JP8A4

[0325] SEQ ID NO: 285 is the determined cDNA sequence for JP8C3

[0326] SEQ ID NO: 286 is the determined cDNA sequence for JP8G4

[0327] SEQ ID NO: 287 is the determined cDNA sequence for JP8B6

[0328] SEQ ID NO: 288 is the determined cDNA sequence for JP8D6

[0329] SEQ ID NO: 289 is the determined cDNA sequence for JP8F5

[0330] SEQ ID NO: 290 is the determined cDNA sequence for JP8A8

[0331] SEQ ID NO: 291 is the determined cDNA sequence for JP8C7

[0332] SEQ ID NO: 292 is the determined cDNA sequence for JP8D7

[0333] SEQ ID NO: 293 is the determined cDNA sequence for P8D8

[0334] SEQ ID NO: 294 is the determined cDNA sequence for JP8E7

[0335] SEQ ID NO: 295 is the determined cDNA sequence for JP8F8

[0336] SEQ ID NO: 296 is the determined cDNA sequence for JP8G8

[0337] SEQ ID NO: 297 is the determined cDNA sequence for JP8B10

[0338] SEQ ID NO: 298 is the determined cDNA sequence for JP8C10

[0339] SEQ ID NO: 299 is the determined cDNA sequence for JP8E9

[0340] SEQ ID NO: 300 is the determined cDNA sequence for JP8E10

[0341] SEQ ID NO: 301 is the determined cDNA sequence for JP8F9

[0342] SEQ ID NO: 302 is the determined cDNA sequence for JP8H9

[0343] SEQ ID NO: 303 is the determined cDNA sequence for JP8C12

[0344] SEQ ID NO: 304 is the determined cDNA sequence for JP8E11

[0345] SEQ ID NO: 305 is the determined cDNA sequence for JP8E12

[0346] SEQ ID NO: 306 is the amino acid sequence for the peptide PS2#12

[0347] SEQ ID NO: 307 is the determined cDNA sequence for P71P

[0348] SEQ ID NO: 308 is the determined cDNA sequence for P712P

[0349] SEQ ID NO: 309 is the determined cDNA sequence for CLONE23

[0350] SEQ ID NO: 310 is the determined cDNA sequence for P774P

[0351] SEQ ID NO: 311 is the determined cDNA sequence for P775P

[0352] SEQ ID NO: 312 is the determined cDNA sequence for P715P

[0353] SEQ ID NO: 313 is the determined cDNA sequence for P710P

[0354] SEQ ID NO: 314 is the determined cDNA sequence for P767P

[0355] SEQ ID NO: 315 is the determined cDNA sequence for P768P

[0356] SEQ ID NO: 316-325 are the determined cDNA sequences of previously isolated genes

[0357] SEQ ID NO: 326 is the determined cDNA sequence for P703PDE5

[0358] SEQ ID NO: 327 is the predicted amino acid sequence for P703PDE5

[0359] SEQ ID NO: 328 is the determined cDNA sequence for P703P6.26

[0360] SEQ ID NO: 329 is the predicted amino acid sequence for P703P6.26

[0361] SEQ ID NO: 330 is the determined cDNA sequence for P703PX-23

[0362] SEQ ID NO: 331 is the predicted amino acid sequence for P703PX-23

[0363] SEQ ID NO: 332 is the determined full length cDNA sequence for P509S

[0364] SEQ ID NO: 333 is the determined extended cDNA sequence for P707P (also referred to as 11-C9)

[0365] SEQ ID NO: 334 is the determined cDNA sequence for P714P

[0366] SEQ ID NO: 335 is the determined cDNA sequence for P705P (also referred to as 9-F3)

[0367] SEQ ID NO: 336 is the predicted amino acid sequence for P705P

[0368] SEQ ID NO: 337 is the amino acid sequence of the peptide P1S#10

[0369] SEQ ID NO: 338 is the amino acid sequence of the peptide p5

[0370] SEQ ID NO: 339 is the predicted amino acid sequence of P509S

[0371] SEQ ID NO: 340 is the determined cDNA sequence for P778P

[0372] SEQ ID NO: 341 is the determined cDNA sequence for P786P

[0373] SEQ ID NO: 342 is the determined cDNA sequence for P789P

[0374] SEQ ID NO: 343 is the determined cDNA sequence for a clone showing homology to Homo sapiens MM46 mRNA

[0375] SEQ ID NO: 344 is the determined cDNA sequence for a clone showing homology to Homo sapiens TNF-alpha stimulated ABC protein (ABC50) mRNA

[0376] SEQ ID NO: 345 is the determined cDNA sequence for a clone showing homology to Homo sapiens mRNA for E-cadherin

[0377] SEQ ID NO: 346 is the determined cDNA sequence for a clone showing homology to Human nuclear-encoded mitochondrial serine hydroxymethyltransferase (SHMT)

[0378] SEQ ID NO: 347 is the determined cDNA sequence for a clone showing homology to Homo sapiens natural resistance-associated macrophage protein2 (NRAMP2)

[0379] SEQ ID NO: 348 is the determined cDNA sequence for a clone showing homology to Homo sapiens phosphoglucomutase-related protein (PGMRP)

[0380] SEQ ID NO: 349 is the determined cDNA sequence for a clone showing homology to Human mRNA for proteosome subunit p40

[0381] SEQ ID NO: 350 is the determined cDNA sequence for P777P

[0382] SEQ ID NO: 351 is the determined cDNA sequence for P779P

[0383] SEQ ID NO: 352 is the determined cDNA sequence for P790P

[0384] SEQ ID NO: 353 is the determined cDNA sequence for P784P

[0385] SEQ ID NO: 354 is the determined cDNA sequence for P776P

[0386] SEQ ID NO: 355 is the determined cDNA sequence for P780P

[0387] SEQ ID NO: 356 is the determined cDNA sequence for P544S

[0388] SEQ ID NO: 357 is the determined cDNA sequence for P745S

[0389] SEQ ID NO: 358 is the determined cDNA sequence for P782P

[0390] SEQ ID NO: 359 is the determined cDNA sequence for P783P

[0391] SEQ ID NO: 360 is the determined cDNA sequence for unknown 17984

[0392] SEQ ID NO: 361 is the determined cDNA sequence for P787P

[0393] SEQ ID NO: 362 is the determined cDNA sequence for P788P

[0394] SEQ ID NO: 363 is the determined cDNA sequence for unknown 17994

[0395] SEQ ID NO: 364 is the determined cDNA sequence for P781P

[0396] SEQ ID NO: 365 is the determined cDNA sequence for P785P

[0397] SEQ ID NO: 366-375 are the determined cDNA sequences for splice variants of B305D.

[0398] SEQ ID NO: 376 is the predicted amino acid sequence encoded by the sequence of SEQ ID NO: 366.

[0399] SEQ ID NO: 377 is the predicted amino acid sequence encoded by the sequence of SEQ ID NO: 372.

[0400] SEQ ID NO: 378 is the predicted amino acid sequence encoded by the sequence of SEQ ID NO: 373.

[0401] SEQ ID NO: 379 is the predicted amino acid sequence encoded by the sequence of SEQ ID NO: 374.

[0402] SEQ ID NO: 380 is the predicted amino acid sequence encoded by the sequence of SEQ ID NO: 375.

[0403] SEQ ID NO: 381 is the determined cDNA sequence for B716P.

[0404] SEQ ID NO: 382 is the determined full-length cDNA sequence for P711P.

[0405] SEQ ID NO: 383 is the predicted amino acid sequence for P711P.

[0406] SEQ ID NO: 384 is the cDNA sequence for P1000C.

[0407] SEQ ID NO: 385 is the cDNA sequence for CGI-82.

[0408] SEQ ID NO:386 is the cDNA sequence for 23320.

[0409] SEQ ID NO:387 is the cDNA sequence for CGI-69.

[0410] SEQ ID NO:388 is the cDNA sequence for L-iditol-2-dehydrogenase.

[0411] SEQ ID NO:389 is the cDNA sequence for 23379.

[0412] SEQ ID NO:390 is the cDNA sequence for 23381.

[0413] SEQ ID NO:391 is the cDNA sequence for KIAA0122.

[0414] SEQ ID NO:392 is the cDNA sequence for 23399.

[0415] SEQ ID NO:393 is the cDNA sequence for a previously identified gene.

[0416] SEQ ID NO:394 is the cDNA sequence for HCLBP.

[0417] SEQ ID NO:395 is the cDNA sequence for transglutaminase.

[0418] SEQ ID NO:396 is the cDNA sequence for a previously identified gene.

[0419] SEQ ID NO:397 is the cDNA sequence for PAP.

[0420] SEQ ID NO:398 is the cDNA sequence for Ets transcription factor PDEF.

[0421] SEQ ID NO:399 is the cDNA sequence for hTGR.

[0422] SEQ ID NO:400 is the cDNA sequence for KIAA0295.

[0423] SEQ ID NO:401 is the cDNA sequence for 22545.

[0424] SEQ ID NO:402 is the cDNA sequence for 22547.

[0425] SEQ ID NO:403 is the cDNA sequence for 22548.

[0426] SEQ ID NO:404 is the cDNA sequence for 22550.

[0427] SEQ ID NO:405 is the cDNA sequence for 22551.

[0428] SEQ ID NO:406 is the cDNA sequence for 22552.

[0429] SEQ ID NO:407 is the cDNA sequence for 22553 (also known as P1020C).

[0430] SEQ ID NO:408 is the cDNA sequence for 22558.

[0431] SEQ ID NO:409 is the cDNA sequence for 22562.

[0432] SEQ ID NO:410 is the cDNA sequence for 22565.

[0433] SEQ ID NO:411 is the cDNA sequence for 22567.

[0434] SEQ ID NO:412 is the cDNA sequence for 22568.

[0435] SEQ ID NO:413 is the cDNA sequence for 22570.

[0436] SEQ ID NO:414 is the cDNA sequence for 22571.

[0437] SEQ ID NO:415 is the cDNA sequence for 22572.

[0438] SEQ ID NO:416 is the cDNA sequence for 22573.

[0439] SEQ ID NO:417 is the cDNA sequence for 22573.

[0440] SEQ ID NO:418 is the cDNA sequence for 22575.

[0441] SEQ ID NO:419 is the cDNA sequence for 22580.

[0442] SEQ ID NO:420 is the cDNA sequence for 22581.

[0443] SEQ ID NO:421 is the cDNA sequence for 22582.

[0444] SEQ ID NO:422 is the cDNA sequence for 22583.

[0445] SEQ ID NO:423 is the cDNA sequence for 22584.

[0446] SEQ ID NO:424 is the cDNA sequence for 22585.

[0447] SEQ ID NO:425 is the cDNA sequence for 22586.

[0448] SEQ ID NO:426 is the cDNA sequence for 22587.

[0449] SEQ ID NO:427 is the cDNA sequence for 22588.

[0450] SEQ ID NO:428 is the cDNA sequence for 22589.

[0451] SEQ ID NO:429 is the cDNA sequence for 22590.

[0452] SEQ ID NO:430 is the cDNA sequence for 22591.

[0453] SEQ ID NO:431 is the cDNA sequence for 22592.

[0454] SEQ ID NO:432 is the cDNA sequence for 22593.

[0455] SEQ ID NO:433 is the cDNA sequence for 22594.

[0456] SEQ ID NO:434 is the cDNA sequence for 22595.

[0457] SEQ ID NO:435 is the cDNA sequence for 22596.

[0458] SEQ ID NO:436 is the cDNA sequence for 22847.

[0459] SEQ ID NO:437 is the cDNA sequence for 22848.

[0460] SEQ ID NO:438 is the cDNA sequence for 22849.

[0461] SEQ ID NO:439 is the cDNA sequence for 22851.

[0462] SEQ ID NO:440 is the cDNA sequence for 22852.

[0463] SEQ ID NO:441 is the cDNA sequence for 22853.

[0464] SEQ ID NO:442 is the cDNA sequence for 22854.

[0465] SEQ ID NO:443 is the cDNA sequence for 22855.

[0466] SEQ ID NO:444 is the cDNA sequence for 22856.

[0467] SEQ ID NO:445 is the cDNA sequence for 22857.

[0468] SEQ ID NO:446 is the cDNA sequence for 23601.

[0469] SEQ ID NO:447 is the cDNA sequence for 23602.

[0470] SEQ ID NO:448 is the cDNA sequence for 23605.

[0471] SEQ ID NO:449 is the cDNA sequence for 23606.

[0472] SEQ ID NO:450 is the cDNA sequence for 23612.

[0473] SEQ ID NO:451 is the cDNA sequence for 23614.

[0474] SEQ ID NO:452 is the cDNA sequence for 23618.

[0475] SEQ ID NO:453 is the cDNA sequence for 23622.

[0476] SEQ ID NO:454 is the cDNA sequence for folate hydrolase.

[0477] SEQ ID NO:455 is the cDNA sequence for LIM protein.

[0478] SEQ ID NO:456 is the cDNA sequence for a known gene.

[0479] SEQ ID NO:457 is the cDNA sequence for a known gene.

[0480] SEQ ID NO:458 is the cDNA sequence for a previously identified gene.

[0481] SEQ ID NO:459 is the cDNA sequence for 23045.

[0482] SEQ ID NO:460 is the cDNA sequence for 23032.

[0483] SEQ ID NO:461 is the cDNA sequence for 23054.

[0484] SEQ ID NO:462-467 are cDNA sequences for known genes.

[0485] SEQ ID NO:468-471 are cDNA sequences for P710P.

[0486] SEQ ID NO:472 is a cDNA sequence for P1001C.

[0487] SEQ ID NO: 473 is the determined cDNA sequence for a first splice variant of P775P (referred to as 27505).

[0488] SEQ ID NO: 474 is the determined cDNA sequence for a second splice variant of P775P (referred to as 19947).

[0489] SEQ ID NO: 475 is the determined cDNA sequence for a third splice variant of P775P (referred to as 19941).

[0490] SEQ ID NO: 476 is the determined cDNA sequence for a fourth splice variant of P775P (referred to as 19937).

[0491] SEQ ID NO: 477 is a first predicted amino acid sequence encoded by the sequence of SEQ ID NO: 474.

[0492] SEQ ID NO: 478 is a second predicted amino acid sequence encoded by the sequence of SEQ ID NO: 474.

[0493] SEQ ID NO: 479 is the predicted amino acid sequence encoded by the sequence of SEQ ID NO: 475.

[0494] SEQ ID NO: 480 is a first predicted amino acid sequence encoded by the sequence of SEQ ID NO: 473.

[0495] SEQ ID NO: 481 is a second predicted amino acid sequence encoded by the sequence of SEQ ID NO: 473.

[0496] SEQ ID NO: 482 is a third predicted amino acid sequence encoded by the sequence of SEQ ID NO: 473.

[0497] SEQ ID NO: 483 is a fourth predicted amino acid sequence encoded by the sequence of SEQ ID NO: 473.

[0498] SEQ ID NO: 484 is the first 30 amino acids of the M. tuberculosis antigen Ra12.

[0499] SEQ ID NO: 485 is the PCR primer AW025.

[0500] SEQ ID NO: 486 is the PCR primer AW003.

[0501] SEQ ID NO: 487 is the PCR primer AW027.

[0502] SEQ ID NO: 488 is the PCR primer AW026.

[0503] SEQ ID NO: 489-501 are peptides employed in epitope mapping studies.

[0504] SEQ ID NO: 502 is the determined cDNA sequence of the complementarity determining region for the anti-P503S monoclonal antibody 20D4.

[0505] SEQ ID NO: 503 is the determined cDNA sequence of the complementarity determining region for the anti-P503S monoclonal antibody JA1.

[0506] SEQ ID NO: 504 & 505 are peptides employed in epitope mapping studies.

[0507] SEQ ID NO: 506 is the determined cDNA sequence of the complementarity determining region for the anti-P703P monoclonal antibody 8H2.

[0508] SEQ ID NO: 507 is the determined cDNA sequence of the complementarity determining region for the anti-P703P monoclonal antibody 7H8.

[0509] SEQ ID NO: 508 is the determined cDNA sequence of the complementarity determining region for the anti-P703P monoclonal antibody 2D4.

[0510] SEQ ID NO: 509-522 are peptides employed in epitope mapping studies.

[0511] SEQ ID NO: 523 is a mature form of P703P used to raise antibodies against P703P. SEQ ID NO: 524 is the putative full-length cDNA sequence of P703P.

[0512] SEQ ID NO: 525 is the predicted amino acid sequence encoded by SEQ ID NO: 524.

[0513] SEQ ID NO: 526 is the full-length cDNA sequence for P790P.

[0514] SEQ ID NO: 527 is the predicted amino acid sequence for P790P.

[0515] SEQ ID NO: 528 & 529 are PCR primers.

[0516] SEQ ID NO: 530 is the cDNA sequence of a splice variant of SEQ ID NO: 366.

[0517] SEQ ID NO: 531 is the cDNA sequence of the open reading frame of SEQ ID NO: 530.

[0518] SEQ ID NO: 532 is the predicted amino acid encoded by the sequence of

[0519] SEQ ID NO: 531.

[0520] SEQ ID NO: 533 is the DNA sequence of a putative ORF of P775P.

[0521] SEQ ID NO: 534 is the predicted amino acid sequence encoded by SEQ ID NO: 533.

[0522] SEQ ID NO: 535 is a first full-length cDNA sequence for P510S.

[0523] SEQ ID NO: 536 is a second full-length cDNA sequence for P510S.

[0524] SEQ ID NO: 537 is the predicted amino acid sequence encoded by SEQ ID NO: 535.

[0525] SEQ ID NO: 538 is the predicted amino acid sequence encoded by SEQ ID NO: 536.

[0526] SEQ ID NO: 539 is the peptide P501S-370.

[0527] SEQ ID NO: 540 is the peptide P501S-376.

[0528] SEQ ID NO: 541-551 are epitopes of P501S.

[0529] SEQ ID NO: 552 is an extended cDNA sequence for P712P.

[0530] SEQ ID NO: 553-568 are the amino acid sequences encoded by predicted open reading frames within SEQ ID NO: 552.

[0531] SEQ ID NO: 569 is an extended cDNA sequence for P776P.

[0532] SEQ ID NO: 570 is the determined cDNA sequence for a splice variant of P776P referred to as contig 6.

[0533] SEQ ID NO: 571 is the determined cDNA sequence for a splice variant of P776P referred to as contig 7.

[0534] SEQ ID NO: 572 is the determined cDNA sequence for a splice variant of P776P referred to as contig 14.

[0535] SEQ ID NO: 573 is the amino acid sequence encoded by a first predicted ORF of SEQ ID NO: 570.

[0536] SEQ ID NO: 574 is the amino acid sequence encoded by a second predicted ORF of SEQ ID NO: 570.

[0537] SEQ ID NO: 575 is the amino acid sequence encoded by a predicted ORF of

[0538] SEQ ID NO: 571.

[0539] SEQ ID NO: 576-586 are amino acid sequences encoded by predicted ORFs of SEQ ID NO: 569.

[0540] SEQ ID NO: 587 is a DNA consensus sequence of the sequences of P767P and P777P.

[0541] SEQ ID NO: 588-590 are amino acid sequences encoded by predicted ORFs of SEQ ID NO: 587.

[0542] SEQ ID NO: 591 is an extended cDNA sequence for P1020C.

[0543] SEQ ID NO: 592 is the predicted amino acid sequence encoded by the sequence of SEQ ID NO: P1020C.

[0544] SEQ ID NO: 593 is a splice variant of P775P referred to as 50748.

[0545] SEQ ID NO: 594 is a splice variant of P775P referred to as 50717. SEQ ID NO: 595 is a splice variant of P775P referred to as 45985.

[0546] SEQ ID NO: 596 is a splice variant of P775P referred to as 38769.

[0547] SEQ ID NO: 597 is a splice variant of P775P referred to as 37922.

[0548] SEQ ID NO: 598 is a splice variant of P510S referred to as 49274.

[0549] SEQ ID NO: 599 is a splice variant of P510S referred to as 39487.

[0550] SEQ ID NO: 600 is a splice variant of P504S referred to as 5167.16.

[0551] SEQ ID NO: 601 is a splice variant of P504S referred to as 5167.1.

[0552] SEQ ID NO: 602 is a splice variant of P504S referred to as 5163.46.

[0553] SEQ ID NO: 603 is a splice variant of P504S referred to as 5163.42.

[0554] SEQ ID NO: 604 is a splice variant of P504S referred to as 5163.34.

[0555] SEQ ID NO: 605 is a splice variant of P504S referred to as 5163.17.

[0556] SEQ ID NO: 606 is a splice variant of P501S referred to as 10640.

[0557] SEQ ID NO: 607-615 are the sequences of PCR primers.

[0558] SEQ ID NO: 616 is the determined cDNA sequence of a fusion of P703P and PSA.

[0559] SEQ ID NO: 617 is the amino acid sequence of the fusion of P703P and PSA.

[0560] SEQ ID NO: 618-689 are determined cDNA sequences of prostate-specific clones.

[0561] SEQ ID NO: 690 is the cDNA sequence of the gene DD3.

[0562] SEQ ID NO: 691-697 are determined cDNA sequences of prostate-specific clones.

[0563] SEQ ID NO: 698 is an extended cDNA sequence for P714P.

[0564] SEQ ID NO: 699-701 are the cDNA sequences for splice variants of P704P.

[0565] SEQ ID NO: 702 is the cDNA sequence of a spliced variant of P553S referred to as P553S-14.

[0566] SEQ ID NO: 703 is the cDNA sequence of a spliced variant of P553S referred to as P553S-12.

[0567] SEQ ID NO: 704 is the cDNA sequence of a spliced variant of P553S referred to as P553S-10.

[0568] SEQ ID NO: 705 is the cDNA sequence of a spliced variant of P553S referred to as P553S-6.

[0569] SEQ ID NO: 706 is the amino acid sequence encoded by SEQ ID NO: 705.

[0570] SEQ ID NO: 707 is the amino acid sequence encoded by SEQ ID NO: 702

[0571] SEQ ID NO: 708 is a second amino acid sequence encoded by SEQ ID NO: 702.

### DETAILED DESCRIPTION OF THE INVENTION

[0572] As noted above, the present invention is generally directed to compositions and methods for using the compositions, for example in the therapy and diagnosis of cancer, such as prostate cancer. Certain illustrative compositions described herein include prostate-specific polypeptides, polynucleotides encoding such polypeptides, binding agents such as antibodies, antigen presenting cells (APCs) and/or immune system cells (e.g., T cells). A “prostate-specific protein,” as the term is used herein, refers generally to a protein that is expressed in prostate cells at a level that is at least two fold, and preferably at least five fold, greater than the level of expression in other normal tissues, as determined using a representative assay provided herein. Certain prostate-specific proteins are tumor proteins that react detectably (within an immunoassay, such as an ELISA or Western blot) with antisera of a patient afflicted with prostate cancer.

[0573] Therefore, in accordance with the above, and as described further below, the present invention provides illustrative polynucleotide compositions having sequences set forth in SEQ ID NO: 1-111, 115-171, 173-175, 177, 179-305, 307-315, 326, 328, 330, 332-335,340-375, 381, 382 and 384-476, 524, 526, 530, 531, 533, 535, 536, 552, 569-572, 587, 591, 593-606, 618-689 and 690-705, illustrative polypeptide compositions having amino acid sequences set forth in SEQ ID NO: 108, 112, 113, 114, 172, 176, 178, 327, 329, 331, 339, 383, 477-483, 496, 504, 505, 519, 520, 522, 525, 527, 532, 534, 537-551, 553-568, 573-586, 588-590 and 592 and 706-708, antibody compositions capable of binding such polypeptides, and numerous additional embodiments employing such compositions, for example in the detection, diagnosis and/or therapy of human prostate cancer.

Polynucleotide Compositions

[0574] As used herein, the terms “DNA segment” and “polynucleotide” refer to a DNA molecule that has been isolated free of total genomic DNA of a particular species. Therefore, a DNA segment encoding a polypeptide refers to a DNA segment that contains one or more coding sequences yet is substantially isolated away from, or purified free from, total genomic DNA of the species from which the DNA segment is obtained. Included within the terms “DNA segment” and “polynucleotide” are DNA segments and smaller fragments of such segments, and also recombinant vectors, including, for example, plasmids, cosmids, phagemids, phage, viruses, and the like.

[0575] As will be understood by those skilled in the art, the DNA segments of this invention can include genomic sequences, extra-genomic and plasmid-encoded sequences and smaller engineered gene segments that express, or may be adapted to express, proteins, polypeptides, peptides and the like. Such segments may be naturally isolated, or modified synthetically by the hand of man.

[0576] “Isolated,” as used herein, means that a polynucleotide is substantially away from other coding sequences, and that the DNA segment does not contain large portions of unrelated coding DNA, such as large chromosomal fragments or other functional genes or polypeptide coding regions. Of course, this refers to the DNA segment as originally isolated, and does not exclude genes or coding regions later added to the segment by the hand of man.

[0577] As will be recognized by the skilled artisan, polynucleotides may be single-stranded (coding or antisense) or double-stranded, and may be DNA (genomic, cDNA or synthetic) or RNA molecules. RNA molecules include HnRNA molecules, which contain introns and correspond to a DNA molecule in a one-to-one manner, and mRNA molecules, which do not contain introns. Additional coding or non-coding sequences may, but need not, be present within a polynucleotide of the present invention, and a polynucleotide may, but need not, be linked to other molecules and/or support materials.

[0578] Polynucleotides may comprise a native sequence (i.e., an endogenous sequence that encodes a prostate-specific protein or a portion thereof) or may comprise a variant, or a biological or antigenic functional equivalent of such a sequence. Polynucleotide variants may contain one or more substitutions, additions, deletions and/or insertions, as further described below, preferably such that the immunogenicity of the encoded polypeptide is not diminished, relative to a native tumor protein. The effect on the immunogenicity of the encoded polypeptide may generally be assessed as described herein. The term “variants” also encompasses homologous genes of xenogenic origin.

[0579] When comparing polynucleotide or polypeptide sequences, two sequences are said to be “identical” if the sequence of nucleotides or amino acids in the two sequences is the same when aligned for maximum correspondence, as described below. Comparisons between two sequences are typically performed by comparing the sequences over a comparison window to identify and compare local regions of sequence similarity. A “comparison window” as used herein, refers to a segment of at least about 20 contiguous positions, usually 30 to about 75, 40 to about 50, in which a sequence may be compared to a reference sequence of the same number of contiguous positions after the two sequences are optimally aligned.

[0580] Optimal alignment of sequences for comparison may be conducted using the Megalign program in the Lasergene suite of bioinformatics software (DNASTAR, Inc., Madison, Wis.), using default parameters. This program embodies several alignment schemes described in the following references: Dayhoff, M. O. (1978) A model of evolutionary change in proteins—Matrices for detecting distant relationships. In Dayhoff, M. O. (ed.) Atlas of Protein Sequence and Structure, National Biomedical Research Foundation, Washington D.C. Vol. 5, Suppl. 3, pp. 345-358; Hein J. (1990) Unified Approach to Alignment and Phylogenes pp. 626-645 Methods in Enzymology vol. 183, Academic Press, Inc., San Diego, Calif.; Higgins, D. G. and Sharp, P. M. (1989) CABIOS 5:151-153; Myers, E. W. and Muller W. (1988) CABIOS 4:11-17; Robinson, E. D. (1971) Comb. Theor 11:105; Santou, N. Nes, M. (1987) Mol. Biol. Evol. 4:406-425; Sneath, P. H. A. and Sokal, R. R. (1973) Numerical Taxonomy—the Principles and Practice of Numerical Taxonomy, Freeman Press, San Francisco, Calif.; Wilbur, W. J. and Lipman, D. J. (1983) Proc. Natl. Acad., Sci. USA 80:726-730.

[0581] Alternatively, optimal alignment of sequences for comparison may be conducted by the local identity algorithm of Smith and Waterman (1981) Add. APL. Math 2:482, by the identity alignment algorithm of Needleman and Wunsch (1970) J. Mol. Biol. 48:443, by the search for similarity methods of Pearson and Lipman (1988) Proc. Natl. Acad. Sci. USA 85: 2444, by computerized implementations of these algorithms (GAP, BESTFIT, BLAST, FASTA, and TFASTA in the Wisconsin Genetics Software Package, Genetics Computer Group (GCG), 575 Science Dr., Madison, Wis.), or by inspection.

[0582] One preferred example of algorithms that are suitable for determining percent sequence identity and sequence similarity are the BLAST and BLAST 2.0 algorithms, which are described in Altschul et al. (1977) Nucl. Acids Res. 25:3389-3402 and Altschul et al. (1990) J. Mol. Biol. 215:403-410, respectively. BLAST and BLAST 2.0 can be used, for example with the parameters described herein, to determine percent sequence identity for the polynucleotides and polypeptides of the invention. Software for performing BLAST analyses is publicly available through the National Center for Biotechnology Information. In one illustrative example, cumulative scores can be calculated using, for nucleotide sequences, the parameters M (reward score for a pair of matching residues; always >0) and N (penalty score for mismatching residues; always <0). For amino acid sequences, a scoring matrix can be used to calculate the cumulative score. Extension of the word hits in each direction are halted when: the cumulative alignment score falls off by the quantity X from its maximum achieved value; the cumulative score goes to zero or below, due to the accumulation of one or more negative-scoring residue alignments; or the end of either sequence is reached. The BLAST algorithm parameters W, T and X determine the sensitivity and speed of the alignment. The BLASTN program (for nucleotide sequences) uses as defaults a wordlength (W) of 11, and expectation (E) of 10, and the BLOSUM62 scoring matrix (see Henikoff and Henikoff (1989) Proc. Natl. Acad. Sci. USA 89:10915) alignments, (B) of 50, expectation (E) of 10, M=5, N=−4 and a comparison of both strands.

[0583] Preferably, the “percentage of sequence identity” is determined by comparing two optimally aligned sequences over a window of comparison of at least 20 positions, wherein the portion of the polynucleotide or polypeptide sequence in the comparison window may comprise additions or deletions (i.e., gaps) of 20 percent or less, usually 5 to 15 percent, or 10 to 12 percent, as compared to the reference sequences (which does not comprise additions or deletions) for optimal alignment of the two sequences. The percentage is calculated by determining the number of positions at which the identical nucleic acid bases or amino acid residue occurs in both sequences to yield the number of matched positions, dividing the number of matched positions by the total number of positions in the reference sequence (i.e., the window size) and multiplying the results by 100 to yield the percentage of sequence identity.

[0584] Therefore, the present invention encompasses polynucleotide and polypeptide sequences having substantial identity to the sequences disclosed herein, for example those comprising at least 50% sequence identity, preferably at least 55%, 60%, 65%, 70%, 75%, 80%, 85%, 90%, 95%, 96%, 97%, 98%, or 99% or higher, sequence identity compared to a polynucleotide or polypeptide sequence of this invention using the methods described herein, (e.g., BLAST analysis using standard parameters, as described below). One skilled in this art will recognize that these values can be appropriately adjusted to determine corresponding identity of proteins encoded by two nucleotide sequences by taking into account codon degeneracy, amino acid similarity, reading frame positioning and the like.

[0585] In additional embodiments, the present invention provides isolated polynucleotides and polypeptides comprising various lengths of contiguous stretches of sequence identical to or complementary to one or more of the sequences disclosed herein. For example, polynucleotides are provided by this invention that comprise at least about 15, 20, 30, 40, 50, 75, 100, 150, 200, 300, 400, 500 or 1000 or more contiguous nucleotides of one or more of the sequences disclosed herein as well as all intermediate lengths there between. It will be readily understood that “intermediate lengths”, in this context, means any length between the quoted values, such as 16, 17, 18, 19, etc.; 21, 22, 23, etc.; 30, 31, 32, etc.; 50, 51, 52, 53, etc.; 100, 101, 102, 103, etc.; 150, 151, 152, 153, etc.; including all integers through 200-500; 500-1,000, and the like.

[0586] The polynucleotides of the present invention, or fragments thereof, regardless of the length of the coding sequence itself, may be combined with other DNA sequences, such as promoters, polyadenylation signals, additional restriction enzyme sites, multiple cloning sites, other coding segments, and the like, such that their overall length may vary considerably. It is therefore contemplated that a nucleic acid fragment of almost any length may be employed, with the total length preferably being limited by the ease of preparation and use in the intended recombinant DNA protocol. For example, illustrative DNA segments with total lengths of about 10,000, about 5000, about 3000, about 2,000, about 1,000, about 500, about 200, about 100, about 50 base pairs in length, and the like, (including all intermediate lengths) are contemplated to be useful in many implementations of this invention.

[0587] In other embodiments, the present invention is directed to polynucleotides that are capable of hybridizing under moderately stringent conditions to a polynucleotide sequence provided herein, or a fragment thereof, or a complementary sequence thereof. Hybridization techniques are well known in the art of molecular biology. For purposes of illustration, suitable moderately stringent conditions for testing the hybridization of a polynucleotide of this invention with other polynucleotides include prewashing in a solution of 5×SSC, 0.5% SDS, 1.0 mM EDTA (pH 8.0); hybridizing at 50° C.-65° C., 5×SSC, overnight; followed by washing twice at 65° C. for 20 minutes with each of 2×, 0.5× and 0.2×SSC containing 0.1% SDS.

[0588] Moreover, it will be appreciated by those of ordinary skill in the art that, as a result of the degeneracy of the genetic code, there are many nucleotide sequences that encode a polypeptide as described herein. Some of these polynucleotides bear minimal homology to the nucleotide sequence of any native gene. Nonetheless, polynucleotides that vary due to differences in codon usage are specifically contemplated by the present invention. Further, alleles of the genes comprising the polynucleotide sequences provided herein are within the scope of the present invention. Alleles are endogenous genes that are altered as a result of one or more mutations, such as deletions, additions and/or substitutions of nucleotides. The resulting mRNA and protein may, but need not, have an altered structure or function. Alleles may be identified using standard techniques (such as hybridization, amplification and/or database sequence comparison).

Probes and Primers

[0589] In other embodiments of the present invention, the polynucleotide sequences provided herein can be advantageously used as probes or primers for nucleic acid hybridization. As such, it is contemplated that nucleic acid segments that comprise a sequence region of at least about 15 nucleotide long contiguous sequence that has the same sequence as, or is complementary to, a 15 nucleotide long contiguous sequence disclosed herein will find particular utility. Longer contiguous identical or complementary sequences, e.g., those of about 20, 30, 40, 50, 100, 200, 500, 1000 (including all intermediate lengths) and even up to full length sequences will also be of use in certain embodiments.

[0590] The ability of such nucleic acid probes to specifically hybridize to a sequence of interest will enable them to be of use in detecting the presence of complementary sequences in a given sample. However, other uses are also envisioned, such as the use of the sequence information for the preparation of mutant species primers, or primers for use in preparing other genetic constructions.

[0591] Polynucleotide molecules having sequence regions consisting of contiguous nucleotide stretches of 10-14, 15-20, 30, 50, or even of 100-200 nucleotides or so (including intermediate lengths as well), identical or complementary to a polynucleotide sequence disclosed herein, are particularly contemplated as hybridization probes for use in, e.g., Southern and Northern blotting. This would allow a gene product, or fragment thereof, to be analyzed, both in diverse cell types and also in various bacterial cells. The total size of fragment, as well as the size of the complementary stretch(es), will ultimately depend on the intended use or application of the particular nucleic acid segment. Smaller fragments will generally find use in hybridization embodiments, wherein the length of the contiguous complementary region may be varied, such as between about 15 and about 100 nucleotides, but larger contiguous complementarity stretches may be used, according to the length complementary sequences one wishes to detect.

[0592] The use of a hybridization probe of about 15-25 nucleotides in length allows the formation of a duplex molecule that is both stable and selective. Molecules having contiguous complementary sequences over stretches greater than 15 bases in length are generally preferred, though, in order to increase stability and selectivity of the hybrid, and thereby improve the quality and degree of specific hybrid molecules obtained. One will generally prefer to design nucleic acid molecules having gene-complementary stretches of 15 to 25 contiguous nucleotides, or even longer where desired.

[0593] Hybridization probes may be selected from any portion of any of the sequences disclosed herein. All that is required is to review the sequence set forth in SEQ ID NO: 1-111, 115-171, 173-175, 177, 179-305, 307-315, 326, 328, 330, 332-335, 340-375, 381, 382 and 384-476, 524, 526, 530, 531, 533, 535, 536, 552, 569-572, 587, 591, 593-606, 618-689 and 690-705, or to any continuous portion of the sequence, from about 15-25 nucleotides in length up to and including the full length sequence, that one wishes to utilize as a probe or primer. The choice of probe and primer sequences may be governed by various factors. For example, one may wish to employ primers from towards the termini of the total sequence.

[0594] Small polynucleotide segments or fragments may be readily prepared by, for example, directly synthesizing the fragment by chemical means, as is commonly practiced using an automated oligonucleotide synthesizer. Also, fragments may be obtained by application of nucleic acid reproduction technology, such as the PCR™ technology of U.S. Pat. No. 4,683,202 (incorporated herein by reference), by introducing selected sequences into recombinant vectors for recombinant production, and by other recombinant DNA techniques generally known to those of skill in the art of molecular biology.

[0595] The nucleotide sequences of the invention may be used for their ability to selectively form duplex molecules with complementary stretches of the entire gene or gene fragments of interest. Depending on the application envisioned, one will typically desire to employ varying conditions of hybridization to achieve varying degrees of selectivity of probe towards target sequence. For applications requiring high selectivity, one will typically desire to employ relatively stringent conditions to form the hybrids, e.g., one will select relatively low salt and/or high temperature conditions, such as provided by a salt concentration of from about 0.02 M to about 0.15 M salt at temperatures of from about 50° C. to about 70° C. Such selective conditions tolerate little, if any, mismatch between the probe and the template or target strand, and would be particularly suitable for isolating related sequences.

[0596] Of course, for some applications, for example, where one desires to prepare mutants employing a mutant primer strand hybridized to an underlying template, less stringent (reduced stringency) hybridization conditions will typically be needed in order to allow formation of the heteroduplex. In these circumstances, one may desire to employ salt conditions such as those of from about 0.15 M to about 0.9 M salt, at temperatures ranging from about 20° C. to about 55° C. Cross-hybridizing species can thereby be readily identified as positively hybridizing signals with respect to control hybridizations. In any case, it is generally appreciated that conditions can be rendered more stringent by the addition of increasing amounts of formamide, which serves to destabilize the hybrid duplex in the same manner as increased temperature. Thus, hybridization conditions can be readily manipulated, and thus will generally be a method of choice depending on the desired results.

Polynucleotide Identification and Characterization

[0597] Polynucleotides may be identified, prepared and/or manipulated using any of a variety of well established techniques. For example, a polynucleotide may be identified, as described in more detail below, by screening a microarray of cDNAs for tumor-associated expression (i.e., expression that is at least two fold greater in a tumor than in normal tissue, as determined using a representative assay provided herein). Such screens may be performed, for example, using a Synteni microarray (Palo Alto, Calif.) according to the manufacturer's instructions (and essentially as described by Schena et al., Proc. Natl. Acad. Sci. USA 93:10614-10619, 1996 and Heller et al., Proc. Natl. Acad. Sci. USA 94:2150-2155, 1997). Alternatively, polynucleotides may be amplified from cDNA prepared from cells expressing the proteins described herein, such as prostate cells. Such polynucleotides may be amplified via polymerase chain reaction (PCR). For this approach, sequence-specific primers may be designed based on the sequences provided herein, and may be purchased or synthesized.

[0598] An amplified portion of a polynucleotide of the present invention may be used to isolate a full length gene from a suitable library (e.g., a prostate-specific cDNA library) using well known techniques. Within such techniques, a library (cDNA or genomic) is screened using one or more polynucleotide probes or primers suitable for amplification. Preferably, a library is size-selected to include larger molecules. Random primed libraries may also be preferred for identifying 5′ and upstream regions of genes. Genomic libraries are preferred for obtaining introns and extending 5′ sequences.

[0599] For hybridization techniques, a partial sequence may be labeled (e.g., by nick-translation or end-labeling with ³²P) using well known techniques. A bacterial or bacteriophage library is then generally screened by hybridizing filters containing denatured bacterial colonies (or lawns containing phage plaques) with the labeled probe (see Sambrook et al., Molecular Cloning: A Laboratory Manual, Cold Spring Harbor Laboratories, Cold Spring Harbor, N.Y., 1989). Hybridizing colonies or plaques are selected and expanded, and the DNA is isolated for further analysis. cDNA clones may be analyzed to determine the amount of additional sequence by, for example, PCR using a primer from the partial sequence and a primer from the vector. Restriction maps and partial sequences may be generated to identify one or more overlapping clones. The complete sequence may then be determined using standard techniques, which may involve generating a series of deletion clones. The resulting overlapping sequences can then assembled into a single contiguous sequence. A full length cDNA molecule can be generated by ligating suitable fragments, using well known techniques.

[0600] Alternatively, there are numerous amplification techniques for obtaining a full length coding sequence from a partial cDNA sequence. Within such techniques, amplification is generally performed via PCR. Any of a variety of commercially available kits may be used to perform the amplification step. Primers may be designed using, for example, software well known in the art. Primers are preferably 22-30 nucleotides in length, have a GC content of at least 50% and anneal to the target sequence at temperatures of about 68° C. to 72° C. The amplified region may be sequenced as described above, and overlapping sequences assembled into a contiguous sequence.

[0601] One such amplification technique is inverse PCR (see Triglia et al., Nucl. Acids Res. 16:8186, 1988), which uses restriction enzymes to generate a fragment in the known region of the gene. The fragment is then circularized by intramolecular ligation and used as a template for PCR with divergent primers derived from the known region. Within an alternative approach, sequences adjacent to a partial sequence may be retrieved by amplification with a primer to a linker sequence and a primer specific to a known region. The amplified sequences are typically subjected to a second round of amplification with the same linker primer and a second primer specific to the known region. A variation on this procedure, which employs two primers that initiate extension in opposite directions from the known sequence, is described in WO 96/38591. Another such technique is known as “rapid amplification of cDNA ends” or RACE. This technique involves the use of an internal primer and an external primer, which hybridizes to a polyA region or vector sequence, to identify sequences that are 5′ and 3′ of a known sequence. Additional techniques include capture PCR (Lagerstrom et al., PCR Methods Applic. 1:111-19, 1991) and walking PCR (Parker et al., Nucl. Acids. Res. 19:3055-60, 1991). Other methods employing amplification may also be employed to obtain a full length cDNA sequence.

[0602] In certain instances, it is possible to obtain a full length cDNA sequence by analysis of sequences provided in an expressed sequence tag (EST) database, such as that available from GenBank. Searches for overlapping ESTs may generally be performed using well known programs (e.g., NCBI BLAST searches), and such ESTs may be used to generate a contiguous full length sequence. Full length DNA sequences may also be obtained by analysis of genomic fragments.

Polynucleotide Expression in Host Cells

[0603] In other embodiments of the invention, polynucleotide sequences or fragments thereof which encode polypeptides of the invention, or fusion proteins or functional equivalents thereof, may be used in recombinant DNA molecules to direct expression of a polypeptide in appropriate host cells. Due to the inherent degeneracy of the genetic code, other DNA sequences that encode substantially the same or a functionally equivalent amino acid sequence may be produced and these sequences may be used to clone and express a given polypeptide.

[0604] As will be understood by those of skill in the art, it may be advantageous in some instances to produce polypeptide-encoding nucleotide sequences possessing non-naturally occurring codons. For example, codons preferred by a particular prokaryotic or eukaryotic host can be selected to increase the rate of protein expression or to produce a recombinant RNA transcript having desirable properties, such as a half-life which is longer than that of a transcript generated from the naturally occurring sequence.

[0605] Moreover, the polynucleotide sequences of the present invention can be engineered using methods generally known in the art in order to alter polypeptide encoding sequences for a variety of reasons, including but not limited to, alterations which modify the cloning, processing, and/or expression of the gene product. For example, DNA shuffling by random fragmentation and PCR reassembly of gene fragments and synthetic oligonucleotides may be used to engineer the nucleotide sequences. In addition, site-directed mutagenesis may be used to insert new restriction sites, alter glycosylation patterns, change codon preference, produce splice variants, or introduce mutations, and so forth.

[0606] In another embodiment of the invention, natural, modified, or recombinant nucleic acid sequences may be ligated to a heterologous sequence to encode a fusion protein. For example, to screen peptide libraries for inhibitors of polypeptide activity, it may be useful to encode a chimeric protein that can be recognized by a commercially available antibody. A fusion protein may also be engineered to contain a cleavage site located between the polypeptide-encoding sequence and the heterologous protein sequence, so that the polypeptide may be cleaved and purified away from the heterologous moiety.

[0607] Sequences encoding a desired polypeptide may be synthesized, in whole or in part, using chemical methods well known in the art (see Caruthers, M. H. et al. (1980) Nucl. Acids Res. Symp. Ser. 215-223, Horn, T. et al. (1980) Nucl. Acids Res. Symp. Ser. 225-232). Alternatively, the protein itself may be produced using chemical methods to synthesize the amino acid sequence of a polypeptide, or a portion thereof. For example, peptide synthesis can be performed using various solid-phase techniques (Roberge, J. Y. et al. (1995) Science 269:202-204) and automated synthesis may be achieved, for example, using the ABI 431A Peptide Synthesizer (Perkin Elmer, Palo Alto, Calif.).

[0608] A newly synthesized peptide may be substantially purified by preparative high performance liquid chromatography (e.g., Creighton, T. (1983) Proteins, Structures and Molecular Principles, WH Freeman and Co., New York, N.Y.) or other comparable techniques available in the art. The composition of the synthetic peptides may be confirmed by amino acid analysis or sequencing (e.g., the Edman degradation procedure). Additionally, the amino acid sequence of a polypeptide, or any part thereof, may be altered during direct synthesis and/or combined using chemical methods with sequences from other proteins, or any part thereof, to produce a variant polypeptide.

[0609] In order to express a desired polypeptide, the nucleotide sequences encoding the polypeptide, or functional equivalents, may be inserted into appropriate expression vector, i.e., a vector which contains the necessary elements for the transcription and translation of the inserted coding sequence. Methods which are well known to those skilled in the art may be used to construct expression vectors containing sequences encoding a polypeptide of interest and appropriate transcriptional and translational control elements. These methods include in vitro recombinant DNA techniques, synthetic techniques, and in vivo genetic recombination. Such techniques are described in Sambrook, J. et al. (1989) Molecular Cloning, A Laboratory Manual, Cold Spring Harbor Press, Plainview, N.Y., and Ausubel, F. M. et al. (1989) Current Protocols in Molecular Biology, John Wiley & Sons, New York. N.Y.

[0610] A variety of expression vector/host systems may be utilized to contain and express polynucleotide sequences. These include, but are not limited to, microorganisms such as bacteria transformed with recombinant bacteriophage, plasmid, or cosmid DNA expression vectors; yeast transformed with yeast expression vectors; insect cell systems infected with virus expression vectors (e.g., baculovirus); plant cell systems transformed with virus expression vectors (e.g., cauliflower mosaic virus, CaMV; tobacco mosaic virus, TMV) or with bacterial expression vectors (e.g., Ti or pBR322 plasmids); or animal cell systems.

[0611] The “control elements” or “regulatory sequences” present in an expression vector are those non-translated regions of the vector—enhancers, promoters, 5′ and 3′ untranslated regions—which interact with host cellular proteins to carry out transcription and translation. Such elements may vary in their strength and specificity. Depending on the vector system and host utilized, any number of suitable transcription and translation elements, including constitutive and inducible promoters, may be used. For example, when cloning in bacterial systems, inducible promoters such as the hybrid lacZ promoter of the PBLUESCRIPT phagemid (Stratagene, La Jolla, Calif.) or PSPORT1 plasmid (Gibco BRL, Gaithersburg, Md.) and the like may be used. In mammalian cell systems, promoters from mammalian genes or from mammalian viruses are generally preferred. If it is necessary to generate a cell line that contains multiple copies of the sequence encoding a polypeptide, vectors based on SV40 or EBV may be advantageously used with an appropriate selectable marker.

[0612] In bacterial systems, a number of expression vectors may be selected depending upon the use intended for the expressed polypeptide. For example, when large quantities are needed, for example for the induction of antibodies, vectors which direct high level expression of fusion proteins that are readily purified may be used. Such vectors include, but are not limited to, the multifunctional E. Coli cloning and expression vectors such as BLUESCRIPT (Stratagene), in which the sequence encoding the polypeptide of interest may be ligated into the vector in frame with sequences for the amino-terminal Met and the subsequent 7 residues of .beta.-galactosidase so that a hybrid protein is produced; pIN vectors (Van Heeke, G. and S. M. Schuster (1989) J. Biol. Chem. 264:5503-5509); and the like. pGEX Vectors (Promega, Madison, Wis.) may also be used to express foreign polypeptides as fusion proteins with glutathione S-transferase (GST). In general, such fusion proteins are soluble and can easily be purified from lysed cells by adsorption to glutathione-agarose beads followed by elution in the presence of free glutathione. Proteins made in such systems may be designed to include heparin, thrombin, or factor XA protease cleavage sites so that the cloned polypeptide of interest can be released from the GST moiety at will.

[0613] In the yeast, Saccharomyces cerevisiae, a number of vectors containing constitutive or inducible promoters such as alpha factor, alcohol oxidase, and PGH may be used. For reviews, see Ausubel et al. (supra) and Grant et al. (1987) Methods Enzymol. 153:516-544.

[0614] In cases where plant expression vectors are used, the expression of sequences encoding polypeptides may be driven by any of a number of promoters. For example, viral promoters such as the 35S and 19S promoters of CaMV may be used alone or in combination with the omega leader sequence from TMV (Takamatsu, N. (1987) EMBO J. 6:307-311. Alternatively, plant promoters such as the small subunit of RUBISCO or heat shock promoters may be used (Coruzzi, G. et al. (1984) EMBO J. 3:1671-1680; Broglie, R. et al. (1984) Science 224:838-843; and Winter, J. et al. (1991) Results Probl. Cell Differ. 17:85-105). These constructs can be introduced into plant cells by direct DNA transformation or pathogen-mediated transfection. Such techniques are described in a number of generally available reviews (see, for example, Hobbs, S. or Murry, L. E. in McGraw Hill Yearbook of Science and Technology (1992) McGraw Hill, New York, N.Y.; pp. 191-196).

[0615] An insect system may also be used to express a polypeptide of interest. For example, in one such system, Autographa californica nuclear polyhedrosis virus (AcNPV) is used as a vector to express foreign genes in Spodoptera frugiperda cells or in Trichoplusia larvae. The sequences encoding the polypeptide may be cloned into a non-essential region of the virus, such as the polyhedrin gene, and placed under control of the polyhedrin promoter. Successful insertion of the polypeptide-encoding sequence will render the polyhedrin gene inactive and produce recombinant virus lacking coat protein. The recombinant viruses may then be used to infect, for example, S. frugiperda cells or Trichoplusia larvae in which the polypeptide of interest may be expressed (Engelhard, E. K. et al. (1994) Proc. Natl. Acad. Sci. 91 :3224-3227).

[0616] In mammalian host cells, a number of viral-based expression systems are generally available. For example, in cases where an adenovirus is used as an expression vector, sequences encoding a polypeptide of interest may be ligated into an adenovirus transcription/translation complex consisting of the late promoter and tripartite leader sequence. Insertion in a non-essential E1 or E3 region of the viral genome may be used to obtain a viable virus which is capable of expressing the polypeptide in infected host cells (Logan, J. and Shenk, T. (1984) Proc. Natl. Acad. Sci. 81:3655-3659). In addition, transcription enhancers, such as the Rous sarcoma virus (RSV) enhancer, may be used to increase expression in mammalian host cells.

[0617] Specific initiation signals may also be used to achieve more efficient translation of sequences encoding a polypeptide of interest. Such signals include the ATG initiation codon and adjacent sequences. In cases where sequences encoding the polypeptide, its initiation codon, and upstream sequences are inserted into the appropriate expression vector, no additional transcriptional or translational control signals may be needed. However, in cases where only coding sequence, or a portion thereof, is inserted, exogenous translational control signals including the ATG initiation codon should be provided. Furthermore, the initiation codon should be in the correct reading frame to ensure translation of the entire insert. Exogenous translational elements and initiation codons may be of various origins, both natural and synthetic. The efficiency of expression may be enhanced by the inclusion of enhancers which are appropriate for the particular cell system which is used, such as those described in the literature (Scharf, D. et al. (1994) Results Probl. Cell Differ. 20:125-162).

[0618] In addition, a host cell strain may be chosen for its ability to modulate the expression of the inserted sequences or to process the expressed protein in the desired fashion. Such modifications of the polypeptide include, but are not limited to, acetylation, carboxylation. glycosylation, phosphorylation, lipidation, and acylation. Post-translational processing which cleaves a “prepro” form of the protein may also be used to facilitate correct insertion, folding and/or function. Different host cells such as CHO, HeLa, MDCK, HEK293, and W138, which have specific cellular machinery and characteristic mechanisms for such post-translational activities, may be chosen to ensure the correct modification and processing of the foreign protein.

[0619] For long-term, high-yield production of recombinant proteins, stable expression is generally preferred. For example, cell lines which stably express a polynucleotide of interest may be transformed using expression vectors which may contain viral origins of replication and/or endogenous expression elements and a selectable marker gene on the same or on a separate vector. Following the introduction of the vector, cells may be allowed to grow for 1-2 days in an enriched media before they are switched to selective media. The purpose of the selectable marker is to confer resistance to selection, and its presence allows growth and recovery of cells which successfully express the introduced sequences. Resistant clones of stably transformed cells may be proliferated using tissue culture techniques appropriate to the cell type.

[0620] Any number of selection systems may be used to recover transformed cell lines. These include, but are not limited to, the herpes simplex virus thymidine kinase (Wigler, M. et al. (1977) Cell 11:223-32) and adenine phosphoribosyltransferase (Lowy, I. et al. (1990) Cell 22:817-23) genes which can be employed in tk.sup.− or aprt.sup.− cells, respectively. Also, antimetabolite, antibiotic or herbicide resistance can be used as the basis for selection; for example, dhfr which confers resistance to methotrexate (Wigler, M. et al. (1980) Proc. Natl. Acad. Sci. 77:3567-70); npt, which confers resistance to the aminoglycosides, neomycin and G-418 (Colbere-Garapin, F. et al (1981) J. Mol. Biol. 150:1-14); and als or pat, which confer resistance to chlorsulfuron and phosphinotricin acetyltransferase, respectively (Murry, supra). Additional selectable genes have been described, for example, trpB, which allows cells to utilize indole in place of tryptophan, or hisD, which allows cells to utilize histinol in place of histidine (Hartman, S. C. and R. C. Mulligan (1988) Proc. Natl. Acad. Sci. 85:8047-51). Recently, the use of visible markers has gained popularity with such markers as anthocyanins, beta-glucuronidase and its substrate GUS, and luciferase and its substrate luciferin, being widely used not only to identify transformants, but also to quantify the amount of transient or stable protein expression attributable to a specific vector system (Rhodes, C. A. et al. (1995) Methods Mol. Biol. 55:121-131).

[0621] Although the presence/absence of marker gene expression suggests that the gene of interest is also present, its presence and expression may need to be confirmed. For example, if the sequence encoding a polypeptide is inserted within a marker gene sequence, recombinant cells containing sequences can be identified by the absence of marker gene function. Alternatively, a marker gene can be placed in tandem with a polypeptide-encoding sequence under the control of a single promoter. Expression of the marker gene in response to induction or selection usually indicates expression of the tandem gene as well.

[0622] Alternatively, host cells which contain and express a desired polynucleotide sequence may be identified by a variety of procedures known to those of skill in the art. These procedures include, but are not limited to, DNA-DNA or DNA-RNA hybridizations and protein bioassay or immunoassay techniques which include membrane, solution, or chip based technologies for the detection and/or quantification of nucleic acid or protein.

[0623] A variety of protocols for detecting and measuring the expression of polynucleotide-encoded products, using either polyclonal or monoclonal antibodies specific for the product are known in the art. Examples include enzyme-linked immunosorbent assay (ELISA), radioimmunoassay (RIA), and fluorescence activated cell sorting (FACS). A two-site, monoclonal-based immunoassay utilizing monoclonal antibodies reactive to two non-interfering epitopes on a given polypeptide may be preferred for some applications, but a competitive binding assay may also be employed. These and other assays are described, among other places, in Hampton, R. et al. (1990; Serological Methods, a Laboratory Manual, APS Press, St Paul. Minn.) and Maddox, D. E. et al. (1983; J. Exp. Med. 158:1211-1216).

[0624] A wide variety of labels and conjugation techniques are known by those skilled in the art and may be used in various nucleic acid and amino acid assays. Means for producing labeled hybridization or PCR probes for detecting sequences related to polynucleotides include oligolabeling, nick translation, end-labeling or PCR amplification using a labeled nucleotide. Alternatively, the sequences, or any portions thereof may be cloned into a vector for the production of an mRNA probe. Such vectors are known in the art, are commercially available, and may be used to synthesize RNA probes in vitro by addition of an appropriate RNA polymerase such as T7, T3, or SP6 and labeled nucleotides. These procedures may be conducted using a variety of commercially available kits. Suitable reporter molecules or labels, which may be used include radionuclides, enzymes, fluorescent, chemiluminescent, or chromogenic agents as well as substrates, cofactors, inhibitors, magnetic particles, and the like.

[0625] Host cells transformed with a polynucleotide sequence of interest may be cultured under conditions suitable for the expression and recovery of the protein from cell culture. The protein produced by a recombinant cell may be secreted or contained intracellularly depending on the sequence and/or the vector used. As will be understood by those of skill in the art, expression vectors containing polynucleotides of the invention may be designed to contain signal sequences which direct secretion of the encoded polypeptide through a prokaryotic or eukaryotic cell membrane. Other recombinant constructions may be used to join sequences encoding a polypeptide of interest to nucleotide sequence encoding a polypeptide domain which will facilitate purification of soluble proteins. Such purification facilitating domains include, but are not limited to, metal chelating peptides such as histidine-tryptophan modules that allow purification on immobilized metals, protein A domains that allow purification on immobilized immunoglobulin, and the domain utilized in the FLAGS extension/affinity purification system (Immunex Corp., Seattle, Wash.). The inclusion of cleavable linker sequences such as those specific for Factor XA or enterokinase (Invitrogen. San Diego, Calif.) between the purification domain and the encoded polypeptide may be used to facilitate purification. One such expression vector provides for expression of a fusion protein containing a polypeptide of interest and a nucleic acid encoding 6 histidine residues preceding a thioredoxin or an enterokinase cleavage site. The histidine residues facilitate purification on IMIAC (immobilized metal ion affinity chromatography) as described in Porath, J. et al. (1992, Prot. Exp. Purif 3:263-281) while the enterokinase cleavage site provides a means for purifying the desired polypeptide from the fusion protein. A discussion of vectors which contain fusion proteins is provided in Kroll, D. J. et al. (1993; DNA Cell Biol. 12:441-453).

[0626] In addition to recombinant production methods, polypeptides of the invention, and fragments thereof, may be produced by direct peptide synthesis using solid-phase techniques (Merrifield J. (1963) J. Am. Chem. Soc. 85:2149-2154). Protein synthesis may be performed using manual techniques or by automation. Automated synthesis may be achieved, for example, using Applied Biosystems 431A Peptide Synthesizer (Perkin Elmer). Alternatively, various fragments may be chemically synthesized separately and combined using chemical methods to produce the full length molecule.

Site-Specific Mutagenesis

[0627] Site-specific mutagenesis is a technique useful in the preparation of individual peptides, or biologically functional equivalent polypeptides, through specific mutagenesis of the underlying polynucleotides that encode them. The technique, well-known to those of skill in the art, further provides a ready ability to prepare and test sequence variants, for example, incorporating one or more of the foregoing considerations, by introducing one or more nucleotide sequence changes into the DNA. Site-specific mutagenesis allows the production of mutants through the use of specific oligonucleotide sequences which encode the DNA sequence of the desired mutation, as well as a sufficient number of adjacent nucleotides, to provide a primer sequence of sufficient size and sequence complexity to form a stable duplex on both sides of the deletion junction being traversed. Mutations may be employed in a selected polynucleotide sequence to improve, alter, decrease, modify, or otherwise change the properties of the polynucleotide itself, and/or alter the properties, activity, composition, stability, or primary sequence of the encoded polypeptide.

[0628] In certain embodiments of the present invention, the inventors contemplate the mutagenesis of the disclosed polynucleotide sequences to alter one or more properties of the encoded polypeptide, such as the antigenicity of a polypeptide vaccine. The techniques of site-specific mutagenesis are well-known in the art, and are widely used to create variants of both polypeptides and polynucleotides. For example, site-specific mutagenesis is often used to alter a specific portion of a DNA molecule. In such embodiments, a primer comprising typically about 14 to about 25 nucleotides or so in length is employed, with about 5 to about 10 residues on both sides of the junction of the sequence being altered.

[0629] As will be appreciated by those of skill in the art, site-specific mutagenesis techniques have often employed a phage vector that exists in both a single stranded and double stranded form. Typical vectors useful in site-directed mutagenesis include vectors such as the M13 phage. These phage are readily commercially-available and their use is generally well-known to those skilled in the art. Double-stranded plasmids are also routinely employed in site directed mutagenesis that eliminates the step of transferring the gene of interest from a plasmid to a phage.

[0630] In general, site-directed mutagenesis in accordance herewith is performed by first obtaining a single-stranded vector or melting apart of two strands of a double-stranded vector that includes within its sequence a DNA sequence that encodes the desired peptide. An oligonucleotide primer bearing the desired mutated sequence is prepared, generally synthetically. This primer is then annealed with the single-stranded vector, and subjected to DNA polymerizing enzymes such as E. coli polymerase I Klenow fragment, in order to complete the synthesis of the mutation-bearing strand. Thus, a heteroduplex is formed wherein one strand encodes the original non-mutated sequence and the second strand bears the desired mutation. This heteroduplex vector is then used to transform appropriate cells, such as E. coli cells, and clones are selected which include recombinant vectors bearing the mutated sequence arrangement.

[0631] The preparation of sequence variants of the selected peptide-encoding DNA segments using site-directed mutagenesis provides a means of producing potentially useful species and is not meant to be limiting as there are other ways in which sequence variants of peptides and the DNA sequences encoding them may be obtained. For example, recombinant vectors encoding the desired peptide sequence may be treated with mutagenic agents, such as hydroxylamine, to obtain sequence variants. Specific details regarding these methods and protocols are found in the teachings of Maloy et al., 1994; Segal, 1976; Prokop and Bajpai, 1991; Kuby, 1994; and Maniatis et al., 1982, each incorporated herein by reference, for that purpose.

[0632] As used herein, the term “oligonucleotide directed mutagenesis procedure” refers to template-dependent processes and vector-mediated propagation which result in an increase in the concentration of a specific nucleic acid molecule relative to its initial concentration, or in an increase in the concentration of a detectable signal, such as amplification. As used herein, the term “oligonucleotide directed mutagenesis procedure” is intended to refer to a process that involves the template-dependent extension of a primer molecule. The term template dependent process refers to nucleic acid synthesis of an RNA or a DNA molecule wherein the sequence of the newly synthesized strand of nucleic acid is dictated by the well-known rules of complementary base pairing (see, for example, Watson, 1987). Typically, vector mediated methodologies involve the introduction of the nucleic acid fragment into a DNA or RNA vector, the clonal amplification of the vector, and the recovery of the amplified nucleic acid fragment. Examples of such methodologies are provided by U.S. Pat. No. 4,237,224, specifically incorporated herein by reference in its entirety.

Polynucleotide Amplification Techniques

[0633] A number of template dependent processes are available to amplify the target sequences of interest present in a sample. One of the best known amplification methods is the polymerase chain reaction (PCR™) which is described in detail in U.S. Pat. Nos. 4,683,195, 4,683,202 and 4,800,159, each of which is incorporated herein by reference in its entirety. Briefly, in PCR™, two primer sequences are prepared which are complementary to regions on opposite complementary strands of the target sequence. An excess of deoxynucleoside triphosphates is added to a reaction mixture along with a DNA polymerase (e.g., Taq polymerase). If the target sequence is present in a sample, the primers will bind to the target and the polymerase will cause the primers to be extended along the target sequence by adding on nucleotides. By raising and lowering the temperature of the reaction mixture, the extended primers will dissociate from the target to form reaction products, excess primers will bind to the target and to the reaction product and the process is repeated. Preferably reverse transcription and PCR™ amplification procedure may be performed in order to quantify the amount of mRNA amplified. Polymerase chain reaction methodologies are well known in the art.

[0634] Another method for amplification is the ligase chain reaction (referred to as LCR), disclosed in Eur. Pat. Appl. Publ. No. 320,308 (specifically incorporated herein by reference in its entirety). In LCR, two complementary probe pairs are prepared, and in the presence of the target sequence, each pair will bind to opposite complementary strands of the target such that they abut. In the presence of a ligase, the two probe pairs will link to form a single unit. By temperature cycling, as in PCR™, bound ligated units dissociate from the target and then serve as “target sequences” for ligation of excess probe pairs. U.S. Pat. No. 4,883,750, incorporated herein by reference in its entirety, describes an alternative method of amplification similar to LCR for binding probe pairs to a target sequence.

[0635] Qbeta Replicase, described in PCT Intl. Pat. Appl. Publ. No. PCT/US87/00880, incorporated herein by reference in its entirety, may also be used as still another amplification method in the present invention. In this method, a replicative sequence of RNA that has a region complementary to that of a target is added to a sample in the presence of an RNA polymerase. The polymerase will copy the replicative sequence that can then be detected.

[0636] An isothermal amplification method, in which restriction endonucleases and ligases are used to achieve the amplification of target molecules that contain nucleotide 5′-[α-thio]triphosphates in one strand of a restriction site (Walker et al., 1992, incorporated herein by reference in its entirety), may also be useful in the amplification of nucleic acids in the present invention.

[0637] Strand Displacement Amplification (SDA) is another method of carrying out isothermal amplification of nucleic acids which involves multiple rounds of strand displacement and synthesis, i.e., nick translation. A similar method, called Repair Chain Reaction (RCR) is another method of amplification which may be useful in the present invention and is involves annealing several probes throughout a region targeted for amplification, followed by a repair reaction in which only two of the four bases are present. The other two bases can be added as biotinylated derivatives for easy detection. A similar approach is used in SDA.

[0638] Sequences can also be detected using a cyclic probe reaction (CPR). In CPR, a probe having a 3′ and 5′ sequences of non-target DNA and an internal or “middle” sequence of the target protein specific RNA is hybridized to DNA which is present in a sample. Upon hybridization, the reaction is treated with RNaseH, and the products of the probe are identified as distinctive products by generating a signal that is released after digestion. The original template is annealed to another cycling probe and the reaction is repeated. Thus, CPR involves amplifying a signal generated by hybridization of a probe to a target gene specific expressed nucleic acid.

[0639] Still other amplification methods described in Great Britain Pat. Appl. No. 2 202 328, and in PCT Intl. Pat. Appl. Publ. No. PCT/US89/01025, each of which is incorporated herein by reference in its entirety, may be used in accordance with the present invention. In the former application, “modified” primers are used in a PCR-like, template and enzyme dependent synthesis. The primers may be modified by labeling with a capture moiety (e.g., biotin) and/or a detector moiety (e.g., enzyme). In the latter application, an excess of labeled probes is added to a sample. In the presence of the target sequence, the probe binds and is cleaved catalytically. After cleavage, the target sequence is released intact to be bound by excess probe. Cleavage of the labeled probe signals the presence of the target sequence.

[0640] Other nucleic acid amplification procedures include transcription-based amplification systems (TAS) (Kwoh et al., 1989; PCT Intl. Pat. Appl. Publ. No. WO 88/10315, incorporated herein by reference in its entirety), including nucleic acid sequence based amplification (NASBA) and 3SR. In NASBA, the nucleic acids can be prepared for amplification by standard phenol/chloroform extraction, heat denaturation of a sample, treatment with lysis buffer and minispin columns for isolation of DNA and RNA or guanidinium chloride extraction of RNA. These amplification techniques involve annealing a primer that has sequences specific to the target sequence. Following polymerization, DNA/RNA hybrids are digested with RNase H while double stranded DNA molecules are heat-denatured again. In either case the single stranded DNA is made fully double stranded by addition of second target-specific primer, followed by polymerization. The double stranded DNA molecules are then multiply transcribed by a polymerase such as T7 or SP6. In an isothermal cyclic reaction, the RNAs are reverse transcribed into DNA, and transcribed once again with a polymerase such as T7 or SP6. The resulting products, whether truncated or complete, indicate target-specific sequences.

[0641] Eur. Pat. Appl. Publ. No. 329,822, incorporated herein by reference in its entirety, disclose a nucleic acid amplification process involving cyclically synthesizing single-stranded RNA (“ssRNA”), ssDNA, and double-stranded DNA (dsDNA), which may be used in accordance with the present invention. The ssRNA is a first template for a first primer oligonucleotide, which is elongated by reverse transcriptase (RNA-dependent DNA polymerase). The RNA is then removed from resulting DNA:RNA duplex by the action of ribonuclease H(RNase H, an RNase specific for RNA in a duplex with either DNA or RNA). The resultant ssDNA is a second template for a second primer, which also includes the sequences of an RNA polymerase promoter (exemplified by T7 RNA polymerase) 5′ to its homology to its template. This primer is then extended by DNA polymerase (exemplified by the large “Klenow” fragment of E. coli DNA polymerase I), resulting as a double-stranded DNA (“dsDNA”) molecule, having a sequence identical to that of the original RNA between the primers and having additionally, at one end, a promoter sequence. This promoter sequence can be used by the appropriate RNA polymerase to make many RNA copies of the DNA. These copies can then re-enter the cycle leading to very swift amplification. With proper choice of enzymes, this amplification can be done isothermally without addition of enzymes at each cycle. Because of the cyclical nature of this process, the starting sequence can be chosen to be in the form of either DNA or RNA.

[0642] PCT Intl. Pat. Appl. Publ. No. WO 89/06700, incorporated herein by reference in its entirety, disclose a nucleic acid sequence amplification scheme based on the hybridization of a promoter/primer sequence to a target single-stranded DNA (“ssDNA”) followed by transcription of many RNA copies of the sequence. This scheme is not cyclic; i.e., new templates are not produced from the resultant RNA transcripts. Other amplification methods include “RACE” (Frohman, 1990), and “one-sided PCR” (Ohara, 1989) which are well-known to those of skill in the art.

[0643] Methods based on ligation of two (or more) oligonucleotides in the presence of nucleic acid having the sequence of the resulting “di-oligonucleotide”, thereby amplifying the di-oligonucleotide (Wu and Dean, 1996, incorporated herein by reference in its entirety), may also be used in the amplification of DNA sequences of the present invention.

Biological Functional Equivalents

[0644] Modification and changes may be made in the structure of the polynucleotides and polypeptides of the present invention and still obtain a functional molecule that encodes a polypeptide with desirable characteristics. As mentioned above, it is often desirable to introduce one or more mutations into a specific polynucleotide sequence. In certain circumstances, the resulting encoded polypeptide sequence is altered by this mutation, or in other cases, the sequence of the polypeptide is unchanged by one or more mutations in the encoding polynucleotide.

[0645] When it is desirable to alter the amino acid sequence of a polypeptide to create an equivalent, or even an improved, second-generation molecule, the amino acid changes may be achieved by changing one or more of the codons of the encoding DNA sequence, according to Table 1.

[0646] For example, certain amino acids may be substituted for other amino acids in a protein structure without appreciable loss of interactive binding capacity with structures such as, for example, antigen-binding regions of antibodies or binding sites on substrate molecules. Since it is the interactive capacity and nature of a protein that defines that protein's biological functional activity, certain amino acid sequence substitutions can be made in a protein sequence, and, of course, its underlying DNA coding sequence, and nevertheless obtain a protein with like properties. It is thus contemplated by the inventors that various changes may be made in the peptide sequences of the disclosed compositions, or corresponding DNA sequences which encode said peptides without appreciable loss of their biological utility or activity.

TABLE 1

| Amino Acids | | | Codons | | | | | |
|---|---|---|---|---|---|---|---|---|
| Alanine | Ala | A | GCA | GCC | GCG | GCU | | |
| Cysteine | Cys | C | UGC | UGU | | | | |
| Aspartic acid | Asp | D | GAC | GAU | | | | |
| Glutamic acid | Glu | E | GAA | GAG | | | | |
| Phenylalanine | Phe | F | UUC | UUU | | | | |
| Glycine | Gly | G | GGA | GGC | GGG | GGU | | |
| Histidine | His | H | CAC | CAU | | | | |
| Isoleucine | Ile | I | AUA | AUC | AUU | | | |
| Lysine | Lys | K | AAA | AAG | | | | |
| Leucine | Leu | L | UUA | UUG | CUA | CUC | CUG | CUU |
| Methionine | Met | M | AUG | | | | | |
| Asparagine | Asn | N | AAC | AAU | | | | |
| Proline | Pro | P | CCA | CCC | CCG | CCU | | |
| Glutamine | Gln | Q | CAA | CAG | | | | |
| Arginine | Arg | R | AGA | AGG | CGA | CGC | CGG | CGU |
| Serine | Ser | S | AGC | AGU | UCA | UCC | UCG | UCU |
| Threonine | Thr | T | ACA | ACC | ACG | ACU | | |
| Valine | Val | V | GUA | GUC | GUG | GUU | | |
| Tryptophan | Trp | W | UGG | | | | | |
| Tyrosine | Tyr | Y | UAC | UAU | | | | |

[0647] In making such changes, the hydropathic index of amino acids may be considered. The importance of the hydropathic amino acid index in conferring interactive biologic function on a protein is generally understood in the art (Kyte and Doolittle, 1982, incorporated herein by reference). It is accepted that the relative hydropathic character of the amino acid contributes to the secondary structure of the resultant protein, which in turn defines the interaction of the protein with other molecules, for example, enzymes, substrates, receptors, DNA, antibodies, antigens, and the like. Each amino acid has been assigned a hydropathic index on the basis of its hydrophobicity and charge characteristics (Kyte and Doolittle, 1982). These values are: isoleucine (+4.5); valine (+4.2); leucine (+3.8); phenylalanine (+2.8); cysteine/cystine (+2.5); methionine (+1.9); alanine (+1.8); glycine (−0.4); threonine (−0.7); serine (−0.8); tryptophan (−0.9); tyrosine (−1.3); proline (−1.6); histidine (−3.2); glutamate (−3.5); glutamine (−3.5); aspartate (−3.5); asparagine (−3.5); lysine (−3.9); and arginine (−4.5).

[0648] It is known in the art that certain amino acids may be substituted by other amino acids having a similar hydropathic index or score and still result in a protein with similar biological activity, i.e., still obtain a biological functionally equivalent protein. In making such changes, the substitution of amino acids whose hydropathic indices are within ±2 is preferred, those within ±1 are particularly preferred, and those within ±0.5 are even more particularly preferred. It is also understood in the art that the substitution of like amino acids can be made effectively on the basis of hydrophilicity. U.S. Pat. No. 4,554,101 (specifically incorporated herein by reference in its entirety), states that the greatest local average hydrophilicity of a protein, as governed by the hydrophilicity of its adjacent amino acids, correlates with a biological property of the protein.

[0649] As detailed in U.S. Pat. No. 4,554,101, the following hydrophilicity values have been assigned to amino acid residues: arginine (+3.0); lysine (+3.0); aspartate (+3.0±1); glutamate (+3.0±1); serine (+0.3); asparagine (+0.2); glutamine (+0.2); glycine (0); threonine (−0.4); proline (−0.5±1); alanine (−0.5); histidine (−0.5); cysteine (−1.0); methionine (−1.3); valine (−1.5); leucine (−1.8); isoleucine (−1.8); tyrosine (−2.3); phenylalanine (−2.5); tryptophan (−3.4). It is understood that an amino acid can be substituted for another having a similar hydrophilicity value and still obtain a biologically equivalent, and in particular, an immunologically equivalent protein. In such changes, the substitution of amino acids whose hydrophilicity values are within ±2 is preferred, those within ±1 are particularly preferred, and those within ±0.5 are even more particularly preferred.

[0650] As outlined above, amino acid substitutions are generally therefore based on the relative similarity of the amino acid side-chain substituents, for example, their hydrophobicity, hydrophilicity, charge, size, and the like. Exemplary substitutions that take various of the foregoing characteristics into consideration are well known to those of skill in the art and include: arginine and lysine; glutamate and aspartate; serine and threonine; glutamine and asparagine; and valine, leucine and isoleucine.

[0651] In addition, any polynucleotide may be further modified to increase stability in vivo. Possible modifications include, but are not limited to, the addition of flanking sequences at the 5′ and/or 3′ ends; the use of phosphorothioate or 2′ O-methyl rather than phosphodiesterase linkages in the backbone; and/or the inclusion of nontraditional bases such as inosine, queosine and wybutosine, as well as acetyl-methyl-, thio- and other modified forms of adenine, cytidine, guanine, thymine and uridine.

In Vivo Polynucleotide Delivery Techniques

[0652] In additional embodiments, genetic constructs comprising one or more of the polynucleotides of the invention are introduced into cells in vivo. This may be achieved using any of a variety or well known approaches, several of which are outlined below for the purpose of illustration.

1. Adenovirus

[0653] One of the preferred methods for in vivo delivery of one or more nucleic acid sequences involves the use of an adenovirus expression vector. “Adenovirus expression vector” is meant to include those constructs containing adenovirus sequences sufficient to (a) support packaging of the construct and (b) to express a polynucleotide that has been cloned therein in a sense or antisense orientation. Of course, in the context of an antisense construct, expression does not require that the gene product be synthesized.

[0654] The expression vector comprises a genetically engineered form of an adenovirus. Knowledge of the genetic organization of adenovirus, a 36 kb, linear, double-stranded DNA virus, allows substitution of large pieces of adenoviral DNA with foreign sequences up to 7 kb (Grunhaus and Horwitz, 1992). In contrast to retrovirus, the adenoviral infection of host cells does not result in chromosomal integration because adenoviral DNA can replicate in an episomal manner without potential genotoxicity. Also, adenoviruses are structurally stable, and no genome rearrangement has been detected after extensive amplification. Adenovirus can infect virtually all epithelial cells regardless of their cell cycle stage. So far, adenoviral infection appears to be linked only to mild disease such as acute respiratory disease in humans.

[0655] Adenovirus is particularly suitable for use as a gene transfer vector because of its mid-sized genome, ease of manipulation, high titer, wide target-cell range and high infectivity. Both ends of the viral genome contain 100-200 base pair inverted repeats (ITRs), which are cis elements necessary for viral DNA replication and packaging. The early (E) and late (L) regions of the genome contain different transcription units that are divided by the onset of viral DNA replication. The E1 region (E1A and E1B) encodes proteins responsible for the regulation of transcription of the viral genome and a few cellular genes. The expression of the E2 region (E2A and E2B) results in the synthesis of the proteins for viral DNA replication. These proteins are involved in DNA replication, late gene expression and host cell shut-off (Renan, 1990). The products of the late genes, including the majority of the viral capsid proteins, are expressed only after significant processing of a single primary transcript issued by the major late promoter (MLP). The MLP, (located at 16.8 m.u.) is particularly efficient during the late phase of infection, and all the mRNA's issued from this promoter possess a 5′-tripartite leader (TPL) sequence which makes them preferred mRNA's for translation.

[0656] In a current system, recombinant adenovirus is generated from homologous recombination between shuttle vector and provirus vector. Due to the possible recombination between two proviral vectors, wild-type adenovirus may be generated from this process. Therefore, it is critical to isolate a single clone of virus from an individual plaque and examine its genomic structure.

[0657] Generation and propagation of the current adenovirus vectors, which are replication deficient, depend on a unique helper cell line, designated 293, which was transformed from human embryonic kidney cells by Ad5 DNA fragments and constitutively expresses E1 proteins (Graham et al., 1977). Since the E3 region is dispensable from the adenovirus genome (Jones and Shenk, 1978), the current adenovirus vectors, with the help of 293 cells, carry foreign DNA in either the E1, the D3 or both regions (Graham and Prevec, 1991). In nature, adenovirus can package approximately 105% of the wild-type genome (Ghosh-Choudhury et al., 1987), providing capacity for about 2 extra kB of DNA. Combined with the approximately 5.5 kB of DNA that is replaceable in the E1 and E3 regions, the maximum capacity of the current adenovirus vector is under 7.5 kB, or about 15% of the total length of the vector. More than 80% of the adenovirus viral genome remains in the vector backbone and is the source of vector-borne cytotoxicity. Also, the replication deficiency of the E1-deleted virus is incomplete. For example, leakage of viral gene expression has been observed with the currently available vectors at high multiplicities of infection (MOI) (Mulligan, 1993).

[0658] Helper cell lines may be derived from human cells such as human embryonic kidney cells, muscle cells, hematopoietic cells or other human embryonic mesenchymal or epithelial cells. Alternatively, the helper cells may be derived from the cells of other mammalian species that are permissive for human adenovirus. Such cells include, e.g., Vero cells or other monkey embryonic mesenchymal or epithelial cells. As stated above, the currently preferred helper cell line is 293.

[0659] Recently, Racher et al. (1995) disclosed improved methods for culturing 293 cells and propagating adenovirus. In one format, natural cell aggregates are grown by inoculating individual cells into 1 liter siliconized spinner flasks (Techne, Cambridge, UK) containing 100-200 ml of medium. Following stirring at 40 rpm, the cell viability is estimated with trypan blue. In another format, Fibra-Cel microcarriers (Bibby Sterlin, Stone, UK) (5 g/l) is employed as follows. A cell inoculum, resuspended in 5 ml of medium, is added to the carrier (50 ml) in a 250 ml Erlenmeyer flask and left stationary, with occasional agitation, for 1 to 4 h. The medium is then replaced with 50 ml of fresh medium and shaking initiated. For virus production, cells are allowed to grow to about 80% confluence, after which time the medium is replaced (to 25% of the final volume) and adenovirus added at an MOI of 0.05. Cultures are left stationary overnight, following which the volume is increased to 100% and shaking commenced for another 72 h.

[0660] Other than the requirement that the adenovirus vector be replication defective, or at least conditionally defective, the nature of the adenovirus vector is not believed to be crucial to the successful practice of the invention. The adenovirus may be of any of the 42 different known serotypes or subgroups A-F. Adenovirus type 5 of subgroup C is the preferred starting material in order to obtain a conditional replication-defective adenovirus vector for use in the present invention, since Adenovirus type 5 is a human adenovirus about which a great deal of biochemical and genetic information is known, and it has historically been used for most constructions employing adenovirus as a vector.

[0661] As stated above, the typical vector according to the present invention is replication defective and will not have an adenovirus E1 region. Thus, it will be most convenient to introduce the polynucleotide encoding the gene of interest at the position from which the E1-coding sequences have been removed. However, the position of insertion of the construct within the adenovirus sequences is not critical to the invention. The polynucleotide encoding the gene of interest may also be inserted in lieu of the deleted E3 region in E3 replacement vectors as described by Karlsson et al. (1986) or in the E4 region where a helper cell line or helper virus complements the E4 defect.

[0662] Adenovirus is easy to grow and manipulate and exhibits broad host range in vitro and in vivo. This group of viruses can be obtained in high titers, e.g., 10⁹-10¹¹ plaque-forming units per ml, and they are highly infective. The life cycle of adenovirus does not require integration into the host cell genome. The foreign genes delivered by adenovirus vectors are episomal and, therefore, have low genotoxicity to host cells. No side effects have been reported in studies of vaccination with wild-type adenovirus (Couch et al., 1963; Top et al., 1971), demonstrating their safety and therapeutic potential as in vivo gene transfer vectors.

[0663] Adenovirus vectors have been used in eukaryotic gene expression (Levrero et al., 1991; Gomez-Foix et al., 1992) and vaccine development (Grunhaus and Horwitz, 1992; Graham and Prevec, 1992). Recently, animal studies suggested that recombinant adenovirus could be used for gene therapy (Stratford-Perricaudet and Perricaudet, 1991; Stratford-Perricaudet et al., 1990; Rich et al., 1993). Studies in administering recombinant adenovirus to different tissues include trachea instillation (Rosenfeld et al., 1991; Rosenfeld et al., 1992), muscle injection (Ragot et al., 1993), peripheral intravenous injections (Herz and Gerard, 1993) and stereotactic inoculation into the brain (Le Gal La Salle et al., 1993).

2. Retroviruses

[0664] The retroviruses are a group of single-stranded RNA viruses characterized by an ability to convert their RNA to double-stranded DNA in infected cells by a process of reverse-transcription (Coffin, 1990). The resulting DNA then stably integrates into cellular chromosomes as a provirus and directs synthesis of viral proteins. The integration results in the retention of the viral gene sequences in the recipient cell and its descendants. The retroviral genome contains three genes, gag, pol, and env that code for capsid proteins, polymerase enzyme, and envelope components, respectively. A sequence found upstream from the gag gene contains a signal for packaging of the genome into virions. Two long terminal repeat (LTR) sequences are present at the 5′ and 3′ ends of the viral genome. These contain strong promoter and enhancer sequences and are also required for integration in the host cell genome (Coffin, 1990).

[0665] In order to construct a retroviral vector, a nucleic acid encoding one or more oligonucleotide or polynucleotide sequences of interest is inserted into the viral genome in the place of certain viral sequences to produce a virus that is replication-defective. In order to produce virions, a packaging cell line containing the gag, pol, and env genes but without the LTR and packaging components is constructed (Mann et al., 1983). When a recombinant plasmid containing a cDNA, together with the retroviral LTR and packaging sequences is introduced into this cell line (by calcium phosphate precipitation for example), the packaging sequence allows the RNA transcript of the recombinant plasmid to be packaged into viral particles, which are then secreted into the culture media (Nicolas and Rubenstein, 1988; Temin, 1986; Mann et al., 1983). The media containing the recombinant retroviruses is then collected, optionally concentrated, and used for gene transfer. Retroviral vectors are able to infect a broad variety of cell types. However, integration and stable expression require the division of host cells (Paskind et al., 1975).

[0666] A novel approach designed to allow specific targeting of retrovirus vectors was recently developed based on the chemical modification of a retrovirus by the chemical addition of lactose residues to the viral envelope. This modification could permit the specific infection of hepatocytes via sialoglycoprotein receptors.

[0667] A different approach to targeting of recombinant retroviruses was designed in which biotinylated antibodies against a retroviral envelope protein and against a specific cell receptor were used. The antibodies were coupled via the biotin components by using streptavidin (Roux et al., 1989). Using antibodies against major histocompatibility complex class I and class II antigens, they demonstrated the infection of a variety of human cells that bore those surface antigens with an ecotropic virus in vitro (Roux et al., 1989).

[0668] 3. Adeno-Associated Viruses

[0669] AAV (Ridgeway, 1988; Hermonat and Muzycska, 1984) is a parovirus, discovered as a contamination of adenoviral stocks. It is a ubiquitous virus (antibodies are present in 85% of the US human population) that has not been linked to any disease. It is also classified as a dependovirus, because its replications is dependent on the presence of a helper virus, such as adenovirus. Five serotypes have been isolated, of which AAV-2 is the best characterized. AAV has a single-stranded linear DNA that is encapsidated into capsid proteins VP1, VP2 and VP3 to form an icosahedral virion of 20 to 24 nm in diameter (Muzyczka and McLaughlin, 1988).

[0670] The AAV DNA is approximately 4.7 kilobases long. It contains two open reading frames and is flanked by two ITRs (FIG. 2). There are two major genes in the AAV genome: rep and cap. The rep gene codes for proteins responsible for viral replications, whereas cap codes for capsid protein VP1-3. Each ITR forms a T-shaped hairpin structure. These terminal repeats are the only essential cis components of the AAV for chromosomal integration. Therefore, the AAV can be used as a vector with all viral coding sequences removed and replaced by the cassette of genes for delivery. Three viral promoters have been identified and named p5, p19, and p40, according to their map position. Transcription from p5 and p19 results in production of rep proteins, and transcription from p40 produces the capsid proteins (Hermonat and Muzyczka, 1984).

[0671] There are several factors that prompted researchers to study the possibility of using rAAV as an expression vector One is that the requirements for delivering a gene to integrate into the host chromosome are surprisingly few. It is necessary to have the 145-bp ITRs, which are only 6% of the AAV genome. This leaves room in the vector to assemble a 4.5-kb DNA insertion. While this carrying capacity may prevent the AAV from delivering large genes, it is amply suited for delivering the antisense constructs of the present invention.

[0672] AAV is also a good choice of delivery vehicles due to its safety. There is a relatively complicated rescue mechanism: not only wild type adenovirus but also AAV genes are required to mobilize rAAV. Likewise, AAV is not pathogenic and not associated with any disease. The removal of viral coding sequences minimizes immune reactions to viral gene expression, and therefore, rAAV does not evoke an inflammatory response.

4. Other Viral Vectors as Expression Constructs

[0673] Other viral vectors may be employed as expression constructs in the present invention for the delivery of oligonucleotide or polynucleotide sequences to a host cell. Vectors derived from viruses such as vaccinia virus (Ridgeway, 1988; Coupar et al., 1988), lentiviruses, polio viruses and herpes viruses may be employed. They offer several attractive features for various mammalian cells (Friedmann, 1989; Ridgeway, 1988; Coupar et al., 1988; Horwich et al, 1990).

[0674] With the recent recognition of defective hepatitis B viruses, new insight was gained into the structure-function relationship of different viral sequences. In vitro studies showed that the virus could retain the ability for helper-dependent packaging and reverse transcription despite the deletion of up to 80% of its genome (Horwich et al., 1990). This suggested that large portions of the genome could be replaced with foreign genetic material. The hepatotropism and persistence (integration) were particularly attractive properties for liver-directed gene transfer. Chang et al. (1991) introduced the chloramphenicol acetyltransferase (CAT) gene into duck hepatitis B virus genome in the place of the polymerase, surface, and pre-surface coding sequences. It was cotransfected with wild-type virus into an avian hepatoma cell line. Culture media containing high titers of the recombinant virus were used to infect primary duckling hepatocytes. Stable CAT gene expression was detected for at least 24 days after transfection (Chang et al, 1991).

5. Non-Viral Vectors

[0675] In order to effect expression of the oligonucleotide or polynucleotide sequences of the present invention, the expression construct must be delivered into a cell. This delivery may be accomplished in vitro, as in laboratory procedures for transforming cells lines, or in vivo or ex vivo, as in the treatment of certain disease states. As described above, one preferred mechanism for delivery is via viral infection where the expression construct is encapsulated in an infectious viral particle.

[0676] Once the expression construct has been delivered into the cell the nucleic acid encoding the desired oligonucleotide or polynucleotide sequences may be positioned and expressed at different sites. In certain embodiments, the nucleic acid encoding the construct may be stably integrated into the genome of the cell. This integration may be in the specific location and orientation via homologous recombination (gene replacement) or it may be integrated in a random, non-specific location (gene augmentation). In yet further embodiments, the nucleic acid may be stably maintained in the cell as a separate, episomal segment of DNA. Such nucleic acid segments or “episomes” encode sequences sufficient to permit maintenance and replication independent of or in synchronization with the host cell cycle. How the expression construct is delivered to a cell and where in the cell the nucleic acid remains is dependent on the type of expression construct employed.

[0677] In certain embodiments of the invention, the expression construct comprising one or more oligonucleotide or polynucleotide sequences may simply consist of naked recombinant DNA or plasmids. Transfer of the construct may be performed by any of the methods mentioned above which physically or chemically permeabilize the cell membrane. This is particularly applicable for transfer in vitro but it may be applied to in vivo use as well. Dubensky et al. (1984) successfully injected polyomavirus DNA in the form of calcium phosphate precipitates into liver and spleen of adult and newborn mice demonstrating active viral replication and acute infection. Benvenisty and Reshef (1986) also demonstrated that direct intraperitoneal injection of calcium phosphate-precipitated plasmids results in expression of the transfected genes. It is envisioned that DNA encoding a gene of interest may also be transferred in a similar manner in vivo and express the gene product.

[0678] Another embodiment of the invention for transferring a naked DNA expression construct into cells may involve particle bombardment. This method depends on the ability to accelerate DNA-coated microprojectiles to a high velocity allowing them to pierce cell membranes and enter cells without killing them (Klein et al., 1987). Several devices for accelerating small particles have been developed. One such device relies on a high voltage discharge to generate an electrical current, which in turn provides the motive force (Yang et al., 1990). The microprojectiles used have consisted of biologically inert substances such as tungsten or gold beads.

[0679] Selected organs including the liver, skin, and muscle tissue of rats and mice have been bombarded in vivo (Yang et al., 1990; Zelenin et al., 1991). This may require surgical exposure of the tissue or cells, to eliminate any intervening tissue between the gun and the target organ, i.e., ex vivo treatment. Again, DNA encoding a particular gene may be delivered via this method and still be incorporated by the present invention.

Antisense Oligonucleotides

[0680] The end result of the flow of genetic information is the synthesis of protein. DNA is transcribed by polymerases into messenger RNA and translated on the ribosome to yield a folded, functional protein. Thus there are several steps along the route where protein synthesis can be inhibited. The native DNA segment coding for a polypeptide described herein, as all such mammalian DNA strands, has two strands: a sense strand and an antisense strand held together by hydrogen bonding. The messenger RNA coding for polypeptide has the same nucleotide sequence as the sense DNA strand except that the DNA thymidine is replaced by uridine. Thus, synthetic antisense nucleotide sequences will bind to a mRNA and inhibit expression of the protein encoded by that mRNA.

[0681] The targeting of antisense oligonucleotides to mRNA is thus one mechanism to shut down protein synthesis, and, consequently, represents a powerful and targeted therapeutic approach. For example, the synthesis of polygalactauronase and the muscarine type 2 acetylcholine receptor are inhibited by antisense oligonucleotides directed to their respective mRNA sequences (U.S. Pat. No. 5,739,119 and U.S. Pat. No. 5,759,829, each specifically incorporated herein by reference in its entirety). Further, examples of antisense inhibition have been demonstrated with the nuclear protein cyclin, the multiple drug resistance gene (MDG1), ICAM-1, E-selectin, STK-1, striatal GABAA receptor and human EGF (Jaskulski et al., 1988; Vasanthakumar and Ahmed, 1989; Peris et al., 1998; U.S. Pat. No. 5,801,154; U.S. Pat. No. 5,789,573; U.S. Pat. No. 5,718,709 and U.S. Pat. No. 5,610,288, each specifically incorporated herein by reference in its entirety). Antisense constructs have also been described that inhibit and can be used to treat a variety of abnormal cellular proliferations, e.g., cancer (U.S. Pat. No. 5,747,470; U.S. Pat. No. 5,591,317 and U.S. Pat. No. 5,783,683, each specifically incorporated herein by reference in its entirety).

[0682] Therefore, in exemplary embodiments, the invention provides oligonucleotide sequences that comprise all, or a portion of, any sequence that is capable of specifically binding to polynucleotide sequence described herein, or a complement thereof. In one embodiment, the antisense oligonucleotides comprise DNA or derivatives thereof. In another embodiment, the oligonucleotides comprise RNA or derivatives thereof. In a third embodiment, the oligonucleotides are modified DNAs comprising a phosphorothioated modified backbone. In a fourth embodiment, the oligonucleotide sequences comprise peptide nucleic acids or derivatives thereof. In each case, preferred compositions comprise a sequence region that is complementary, and more preferably substantially-complementary, and even more preferably, completely complementary to one or more portions of polynucleotides disclosed herein.

[0683] Selection of antisense compositions specific for a given gene sequence is based upon analysis of the chosen target sequence (i.e., in these illustrative examples the rat and human sequences) and determination of secondary structure, Tₘ, binding energy, relative stability, and antisense compositions were selected based upon their relative inability to form dimers, hairpins, or other secondary structures that would reduce or prohibit specific binding to the target mRNA in a host cell.

[0684] Highly preferred target regions of the mRNA, are those which are at or near the AUG translation initiation codon, and those sequences which were substantially complementary to 5′ regions of the mRNA. These secondary structure analyses and target site selection considerations were performed using v.4 of the OLIGO primer analysis software (Rychlik, 1997) and the BLASTN 2.0.5 algorithm software (Altschul et al., 1997).

[0685] The use of an antisense delivery method employing a short peptide vector, termed MPG (27 residues), is also contemplated. The MPG peptide contains a hydrophobic domain derived from the fusion sequence of HIV gp41 and a hydrophilic domain from the nuclear localization sequence of SV40 T-antigen (Morris et al., 1997). It has been demonstrated that several molecules of the MPG peptide coat the antisense oligonucleotides and can be delivered into cultured mammalian cells in less than 1 hour with relatively high efficiency (90%). Further, the interaction with MPG strongly increases both the stability of the oligonucleotide to nuclease and the ability to cross the plasma membrane (Morris et al., 1997).

Ribozymes

[0686] Although proteins traditionally have been used for catalysis of nucleic acids, another class of macromolecules has emerged as useful in this endeavor. Ribozymes are RNA-protein complexes that cleave nucleic acids in a site-specific fashion. Ribozymes have specific catalytic domains that possess endonuclease activity (Kim and Cech, 1987; Gerlach et al., 1987; Forster and Symons, 1987). For example, a large number of ribozymes accelerate phosphoester transfer reactions with a high degree of specificity, often cleaving only one of several phosphoesters in an oligonucleotide substrate (Cech et al., 1981; Michel and Westhof, 1990; Reinhold-Hurek and Shub, 1992). This specificity has been attributed to the requirement that the substrate bind via specific base-pairing interactions to the internal guide sequence (“IGS”) of the ribozyme prior to chemical reaction.

[0687] Ribozyme catalysis has primarily been observed as part of sequence-specific cleavage/ligation reactions involving nucleic acids (Joyce, 1989; Cech et al., 1981). For example, U.S. Pat. No. 5,354,855 (specifically incorporated herein by reference) reports that certain ribozymes can act as endonucleases with a sequence specificity greater than that of known ribonucleases and approaching that of the DNA restriction enzymes. Thus, sequence-specific ribozyme-mediated inhibition of gene expression may be particularly suited to therapeutic applications (Scanlon et al., 1991; Sarver et al., 1990). Recently, it was reported that ribozymes elicited genetic changes in some cells lines to which they were applied; the altered genes included the oncogenes H-ras, c-fos and genes of HIV. Most of this work involved the modification of a target mRNA, based on a specific mutant codon that is cleaved by a specific ribozyme.

[0688] Six basic varieties of naturally-occurring enzymatic RNAs are known presently. Each can catalyze the hydrolysis of RNA phosphodiester bonds in trans (and thus can cleave other RNA molecules) under physiological conditions. In general, enzymatic nucleic acids act by first binding to a target RNA. Such binding occurs through the target binding portion of a enzymatic nucleic acid which is held in close proximity to an enzymatic portion of the molecule that acts to cleave the target RNA. Thus, the enzymatic nucleic acid first recognizes and then binds a target RNA through complementary base-pairing, and once bound to the correct site, acts enzymatically to cut the target RNA. Strategic cleavage of such a target RNA will destroy its ability to direct synthesis of an encoded protein. After an enzymatic nucleic acid has bound and cleaved its RNA target, it is released from that RNA to search for another target and can repeatedly bind and cleave new targets.

[0689] The enzymatic nature of a ribozyme is advantageous over many technologies, such as antisense technology (where a nucleic acid molecule simply binds to a nucleic acid target to block its translation) since the concentration of ribozyme necessary to affect a therapeutic treatment is lower than that of an antisense oligonucleotide. This advantage reflects the ability of the ribozyme to act enzymatically. Thus, a single ribozyme molecule is able to cleave many molecules of target RNA. In addition, the ribozyme is a highly specific inhibitor, with the specificity of inhibition depending not only on the base pairing mechanism of binding to the target RNA, but also on the mechanism of target RNA cleavage. Single mismatches, or base-substitutions, near the site of cleavage can completely eliminate catalytic activity of a ribozyme. Similar mismatches in antisense molecules do not prevent their action (Woolf et al., 1992). Thus, the specificity of action of a ribozyme is greater than that of an antisense oligonucleotide binding the same RNA site.

[0690] The enzymatic nucleic acid molecule may be formed in a hammerhead, hairpin, a hepatitis δ virus, group 1 intron or RNaseP RNA (in association with an RNA guide sequence) or Neurospora VS RNA motif. Examples of hammerhead motifs are described by Rossi et al. (1992). Examples of hairpin motifs are described by Hampel et al. (Eur. Pat. Appl. Publ. No. EP 0360257), Hampel and Tritz (1989), Hampel et al. (1990) and U.S. Pat. No. 5,631,359 (specifically incorporated herein by reference). An example of the hepatitis δ virus motif is described by Perrotta and Been (1992); an example of the RNaseP motif is described by Guerrier-Takada et al. (1983); Neurospora VS RNA ribozyme motif is described by Collins (Saville and Collins, 1990; Saville and Collins, 1991; Collins and Olive, 1993); and an example of the Group 1 intron is described in (U.S. Pat. No. 4,987,071, specifically incorporated herein by reference). All that is important in an enzymatic nucleic acid molecule of this invention is that it has a specific substrate binding site which is complementary to one or more of the target gene RNA regions, and that it have nucleotide sequences within or surrounding that substrate binding site which impart an RNA cleaving activity to the molecule. Thus the ribozyme constructs need not be limited to specific motifs mentioned herein.

[0691] In certain embodiments, it may be important to produce enzymatic cleaving agents which exhibit a high degree of specificity for the RNA of a desired target, such as one of the sequences disclosed herein. The enzymatic nucleic acid molecule is preferably targeted to a highly conserved sequence region of a target mRNA. Such enzymatic nucleic acid molecules can be delivered exogenously to specific cells as required. Alternatively, the ribozymes can be expressed from DNA or RNA vectors that are delivered to specific cells.

[0692] Small enzymatic nucleic acid motifs (e.g., of the hammerhead or the hairpin structure) may also be used for exogenous delivery. The simple structure of these molecules increases the ability of the enzymatic nucleic acid to invade targeted regions of the mRNA structure. Alternatively, catalytic RNA molecules can be expressed within cells from eukaryotic promoters (e.g., Scanlon et al., 1991; Kashani-Sabet et al., 1992; Dropulic et al., 1992; Weerasinghe et al, 1991; Ojwang et al., 1992; Chen et al., 1992; Sarver et al., 1990). Those skilled in the art realize that any ribozyme can be expressed in eukaryotic cells from the appropriate DNA vector. The activity of such ribozymes can be augmented by their release from the primary transcript by a second ribozyme (Int. Pat. Appl. Publ. No. WO 93/23569, and Int. Pat. Appl. Publ. No. WO 94/02595, both hereby incorporated by reference; Ohkawa et al., 1992; Taira et al., 1991; and Ventura et al., 1993).

[0693] Ribozymes may be added directly, or can be complexed with cationic lipids, lipid complexes, packaged within liposomes, or otherwise delivered to target cells. The RNA or RNA complexes can be locally administered to relevant tissues ex vivo, or in vivo through injection, aerosol inhalation, infusion pump or stent, with or without their incorporation in biopolymers.

[0694] Ribozymes may be designed as described in Int. Pat. Appl. Publ. No. WO 93/23569 and Int. Pat. Appl. Publ. No. WO 94/02595, each specifically incorporated herein by reference) and synthesized to be tested in vitro and in vivo, as described. Such ribozymes can also be optimized for delivery. While specific examples are provided, those in the art will recognize that equivalent RNA targets in other species can be utilized when necessary.

[0695] Hammerhead or hairpin ribozymes may be individually analyzed by computer folding (Jaeger et al., 1989) to assess whether the ribozyme sequences fold into the appropriate secondary structure. Those ribozymes with unfavorable intramolecular interactions between the binding arms and the catalytic core are eliminated from consideration. Varying binding arm lengths can be chosen to optimize activity. Generally, at least 5 or so bases on each arm are able to bind to, or otherwise interact with, the target RNA.

[0696] Ribozymes of the hammerhead or hairpin motif may be designed to anneal to various sites in the mRNA message, and can be chemically synthesized. The method of synthesis used follows the procedure for normal RNA synthesis as described in Usman et al. (1987) and in Scaringe et al. (1990) and makes use of common nucleic acid protecting and coupling groups, such as dimethoxytrityl at the 5′-end, and phosphoramidites at the 3′-end. Average stepwise coupling yields are typically >98%. Hairpin ribozymes may be synthesized in two parts and annealed to reconstruct an active ribozyme (Chowrira and Burke, 1992). Ribozymes may be modified extensively to enhance stability by modification with nuclease resistant groups, for example, 2′-amino, 2′-C-allyl, 2′-flouro, 2′-o-methyl, 2′-H (for a review see e.g., Usman and Cedergren, 1992). Ribozymes may be purified by gel electrophoresis using general methods or by high pressure liquid chromatography and resuspended in water.

[0697] Ribozyme activity can be optimized by altering the length of the ribozyme binding arms, or chemically synthesizing ribozymes with modifications that prevent their degradation by serum ribonucleases (see e.g., Int. Pat. Appl. PubI. No. WO 92/07065; Perrault et al, 1990; Pieken et al., 1991; Usman and Cedergren, 1992; Int. Pat. Appl. Publ. No. WO 93/15187; Int. Pat. Appl. Publ. No. WO 91/03162; Eur. Pat. Appl. Publ. No. 92110298.4; U.S. Pat. No. 5,334,711; and Int. Pat. Appl. Publ. No. WO 94/13688, which describe various chemical modifications that can be made to the sugar moieties of enzymatic RNA molecules), modifications which enhance their efficacy in cells, and removal of stem II bases to shorten RNA synthesis times and reduce chemical requirements.

[0698] Sullivan et al. (Int. Pat. Appl. Publ. No. WO 94/02595) describes the general methods for delivery of enzymatic RNA molecules. Ribozymes may be administered to cells by a variety of methods known to those familiar to the art, including, but not restricted to, encapsulation in liposomes, by iontophoresis, or by incorporation into other vehicles, such as hydrogels, cyclodextrins, biodegradable nanocapsules, and bioadhesive microspheres. For some indications, ribozymes may be directly delivered ex vivo to cells or tissues with or without the aforementioned vehicles. Alternatively, the RNA/vehicle combination may be locally delivered by direct inhalation, by direct injection or by use of a catheter, infusion pump or stent. Other routes of delivery include, but are not limited to, intravascular, intramuscular, subcutaneous or joint injection, aerosol inhalation, oral (tablet or pill form), topical, systemic, ocular, intraperitoneal and/or intrathecal delivery. More detailed descriptions of ribozyme delivery and administration are provided in Int. Pat. Appl. Publ. No. WO 94/02595 and Int. Pat. Appl. Publ. No. WO 93/23569, each specifically incorporated herein by reference.

[0699] Another means of accumulating high concentrations of a ribozyme(s) within cells is to incorporate the ribozyme-encoding sequences into a DNA expression vector. Transcription of the ribozyme sequences are driven from a promoter for eukaryotic RNA polymerase I (pol I), RNA polymerase II (pol II), or RNA polymerase III (pol III). Transcripts from pol II or pol III promoters will be expressed at high levels in all cells; the levels of a given pol II promoter in a given cell type will depend on the nature of the gene regulatory sequences (enhancers, silencers, etc.) present nearby. Prokaryotic RNA polymerase promoters may also be used, providing that the prokaryotic RNA polymerase enzyme is expressed in the appropriate cells (Elroy-Stein and Moss, 1990; Gao and Huang, 1993; Lieber et al., 1993; Zhou et al., 1990). Ribozymes expressed from such promoters can function in mammalian cells (e.g., Kashani-Saber et al., 1992; Ojwang et al., 1992; Chen et al., 1992; Yu et al., 1993; L'Huillier et al., 1992; Lisziewicz et al., 1993). Such transcription units can be incorporated into a variety of vectors for introduction into mammalian cells, including but not restricted to, plasmid DNA vectors, viral DNA vectors (such as adenovirus or adeno-associated vectors), or viral RNA vectors (such as retroviral, semliki forest virus, sindbis virus vectors).

[0700] Ribozymes may be used as diagnostic tools to examine genetic drift and mutations within diseased cells. They can also be used to assess levels of the target RNA molecule. The close relationship between ribozyme activity and the structure of the target RNA allows the detection of mutations in any region of the molecule which alters the base-pairing and three-dimensional structure of the target RNA. By using multiple ribozymes, one may map nucleotide changes which are important to RNA structure and function in vitro, as well as in cells and tissues. Cleavage of target RNAs with ribozymes may be used to inhibit gene expression and define the role (essentially) of specified gene products in the progression of disease. In this manner, other genetic targets may be defined as important mediators of the disease. These studies will lead to better treatment of the disease progression by affording the possibility of combinational therapies (e.g., multiple ribozymes targeted to different genes, ribozymes coupled with known small molecule inhibitors, or intermittent treatment with combinations of ribozymes and/or other chemical or biological molecules). Other in vitro uses of ribozymes are well known in the art, and include detection of the presence of mRNA associated with an IL-5 related condition. Such RNA is detected by determining the presence of a cleavage product after treatment with a ribozyme using standard methodology.

Peptide Nucleic Acids

[0701] In certain embodiments, the inventors contemplate the use of peptide nucleic acids (PNAs) in the practice of the methods of the invention. PNA is a DNA mimic in which the nucleobases are attached to a pseudopeptide backbone (Good and Nielsen, 1997). PNA is able to be utilized in a number methods that traditionally have used RNA or DNA. Often PNA sequences perform better in techniques than the corresponding RNA or DNA sequences and have utilities that are not inherent to RNA or DNA. A review of PNA including methods of making, characteristics of, and methods of using, is provided by Corey (1997) and is incorporated herein by reference. As such, in certain embodiments, one may prepare PNA sequences that are complementary to one or more portions of the ACE mRNA sequence, and such PNA compositions may be used to regulate, alter, decrease, or reduce the translation of ACE-specific mRNA, and thereby alter the level of ACE activity in a host cell to which such PNA compositions have been administered.

[0702] PNAs have 2-aminoethyl-glycine linkages replacing the normal phosphodiester backbone of DNA (Nielsen et al., 1991; Hanvey et al., 1992; Hyrup and Nielsen, 1996; Neilsen, 1996). This chemistry has three important consequences: firstly, in contrast to DNA or phosphorothioate oligonucleotides, PNAs are neutral molecules; secondly, PNAs are achiral, which avoids the need to develop a stereoselective synthesis; and thirdly, PNA synthesis uses standard Boc (Dueholm et al., 1994) or Fmoc (Thomson et al., 1995) protocols for solid-phase peptide synthesis, although other methods, including a modified Merrifield method, have been used (Christensen et al., 1995).

[0703] PNA monomers or ready-made oligomers are commercially available from PerSeptive Biosystems (Framingham, Mass.). PNA syntheses by either Boc or Fmoc protocols are straightforward using manual or automated protocols (Norton et al., 1995). The manual protocol lends itself to the production of chemically modified PNAs or the simultaneous synthesis of families of closely related PNAs.

[0704] As with peptide synthesis, the success of a particular PNA synthesis will depend on the properties of the chosen sequence. For example, while in theory PNAs can incorporate any combination of nucleotide bases, the presence of adjacent purines can lead to deletions of one or more residues in the product. In expectation of this difficulty, it is suggested that, in producing PNAs with adjacent purines, one should repeat the coupling of residues likely to be added inefficiently. This should be followed by the purification of PNAs by reverse-phase high-pressure liquid chromatography (Norton et al., 1995) providing yields and purity of product similar to those observed during the synthesis of peptides.

[0705] Modifications of PNAs for a given application may be accomplished by coupling amino acids during solid-phase synthesis or by attaching compounds that contain a carboxylic acid group to the exposed N-terminal amine. Alternatively, PNAs can be modified after synthesis by coupling to an introduced lysine or cysteine. The ease with which PNAs can be modified facilitates optimization for better solubility or for specific functional requirements. Once synthesized, the identity of PNAs and their derivatives can be confirmed by mass spectrometry. Several studies have made and utilized modifications of PNAs (Norton et al., 1995; Haaima et al., 1996; Stetsenko et al., 1996; Petersen et al., 1995; Ulmann et al., 1996; Koch et al., 1995; Orum et al., 1995; Footer et al., 1996; Griffith et al., 1995; Kremsky et al., 1996; Pardridge et al., 1995; Boffa et al., 1995; Landsdorp et al., 1996; Gambacorti-Passerini et al., 1996; Armitage et al., 1997; Seeger et al., 1997; Ruskowski et al., 1997). U.S. Pat. No. 5,700,922 discusses PNA-DNA-PNA chimeric molecules and their uses in diagnostics, modulating protein in organisms, and treatment of conditions susceptible to therapeutics.

[0706] In contrast to DNA and RNA, which contain negatively charged linkages, the PNA backbone is neutral. In spite of this dramatic alteration, PNAs recognize complementary DNA and RNA by Watson-Crick pairing (Egholm et al., 1993), validating the initial modeling by Nielsen et al. (1991). PNAs lack 3′ to 5′ polarity and can bind in either parallel or antiparallel fashion, with the antiparallel mode being preferred (Egholm et al., 1993).

[0707] Hybridization of DNA oligonucleotides to DNA and RNA is destabilized by electrostatic repulsion between the negatively charged phosphate backbones of the complementary strands. By contrast, the absence of charge repulsion in PNA-DNA or PNA-RNA duplexes increases the melting temperature (Tₘ) and reduces the dependence of Tₘ on the concentration of mono- or divalent cations (Nielsen et al., 1991). The enhanced rate and affinity of hybridization are significant because they are responsible for the surprising ability of PNAs to perform strand invasion of complementary sequences within relaxed double-stranded DNA. In addition, the efficient hybridization at inverted repeats suggests that PNAs can recognize secondary structure effectively within double-stranded DNA. Enhanced recognition also occurs with PNAs immobilized on surfaces, and Wang et al. have shown that support-bound PNAs can be used to detect hybridization events (Wang et al., 1996).

[0708] One might expect that tight binding of PNAs to complementary sequences would also increase binding to similar (but not identical) sequences, reducing the sequence specificity of PNA recognition. As with DNA hybridization, however, selective recognition can be achieved by balancing oligomer length and incubation temperature. Moreover, selective hybridization of PNAs is encouraged by PNA-DNA hybridization being less tolerant of base mismatches than DNA-DNA hybridization. For example, a single mismatch within a 16 bp PNA-DNA duplex can reduce the Tₘ by up to 15° C. (Egholm et al., 1993). This high level of discrimination has allowed the development of several PNA-based strategies for the analysis of point mutations (Wang et al., 1996; Carlsson et al., 1996; Thiede et al., 1996; Webb and Hurskainen, 1996; Perry-O'Keefe et al., 1996).

[0709] High-affinity binding provides clear advantages for molecular recognition and the development of new applications for PNAs. For example, 1I-13 nucleotide PNAs inhibit the activity of telomerase, a ribonucleo-protein that extends telomere ends using an essential RNA template, while the analogous DNA oligomers do not (Norton et al., 1996).

[0710] Neutral PNAs are more hydrophobic than analogous DNA oligomers, and this can lead to difficulty solubilizing them at neutral pH, especially if the PNAs have a high purine content or if they have the potential to form secondary structures. Their solubility can be enhanced by attaching one or more positive charges to the PNA termini (Nielsen et al., 1991).

[0711] Findings by Allfrey and colleagues suggest that strand invasion will occur spontaneously at sequences within chromosomal DNA (Boffa et al., 1995; Boffa et al., 1996). These studies targeted PNAs to triplet repeats of the nucleotides CAG and used this recognition to purify transcriptionally active DNA (Boffa et al., 1995) and to inhibit transcription (Boffa et al., 1996). This result suggests that if PNAs can be delivered within cells then they will have the potential to be general sequence-specific regulators of gene expression. Studies and reviews concerning the use of PNAs as antisense and anti-gene agents include Nielsen et al. (1993b), Hanvey et al. (1992), and Good and Nielsen (1997). Koppelhus et al. (1997) have used PNAs to inhibit HIV-1 inverse transcription, showing that PNAs may be used for antiviral therapies.

[0712] Methods of characterizing the antisense binding properties of PNAs are discussed in Rose (1993) and Jensen et al. (1997). Rose uses capillary gel electrophoresis to determine binding of PNAs to their complementary oligonucleotide, measuring the relative binding kinetics and stoichiometry. Similar types of measurements were made by Jensen et al. using BIAcore™ technology.

[0713] Other applications of PNAs include use in DNA strand invasion (Nielsen et al., 1991), antisense inhibition (Hanvey et al., 1992), mutational analysis (Orum et al., 1993), enhancers of transcription (Mollegaard et al., 1994), nucleic acid purification (Orum et al., 1995), isolation of transcriptionally active genes (Boffa et al., 1995), blocking of transcription factor binding (Vickers et al., 1995), genome cleavage (Veselkov et al., 1996), biosensors (Wang et al., 1996), in situ hybridization (Thisted et al., 1996), and in a alternative to Southern blotting (Perry-O'Keefe, 1996).

Polypeptide Compositions

[0714] The present invention, in other aspects, provides polypeptide compositions. Generally, a polypeptide of the invention will be an isolated polypeptide (or an epitope, variant, or active fragment thereof) derived from a mammalian species. Preferably, the polypeptide is encoded by a polynucleotide sequence disclosed herein or a sequence which hybridizes under moderately stringent conditions to a polynucleotide sequence disclosed herein. Alternatively, the polypeptide may be defined as a polypeptide which comprises a contiguous amino acid sequence from an amino acid sequence disclosed herein, or which polypeptide comprises an entire amino acid sequence disclosed herein.

[0715] In the present invention, a polypeptide composition is also understood to comprise one or more polypeptides that are immunologically reactive with antibodies generated against a polypeptide of the invention, particularly a polypeptide having the amino acid sequence disclosed in SEQ ID NO: 108, 112, 113, 114, 172, 176, 178, 327, 329, 331, 339, 383, 477-483, 496, 504, 505, 519, 520, 522, 525, 527, 532, 534, 537-551, 553-568, 573-586, 588-590, 592 and 706-708, or to active fragments, or to variants or biological functional equivalents thereof.

[0716] Likewise, a polypeptide composition of the present invention is understood to comprise one or more polypeptides that are capable of eliciting antibodies that are immunologically reactive with one or more polypeptides encoded by one or more contiguous nucleic acid sequences contained in SEQ ID NO: 1-111, 115-171, 173-175, 177, 179-305, 307-315, 326, 328, 330, 332-335, 340-375, 381, 382 and 384-476, 524, 526, 530, 531, 533, 535, 536, 552, 569-572, 587, 591, 593-606, 618-689 and 690-705, or to active fragments, or to variants thereof, or to one or more nucleic acid sequences which hybridize to one or more of these sequences under conditions of moderate to high stringency. Particularly illustrative polypeptides include the amino acid sequence disclosed in SEQ ID NO: 108, 112, 113, 114, 172, 176, 178, 327, 329, 331, 339, 383, 477-483, 496, 504, 505, 519, 520, 522, 525, 527, 532, 534, 537-551, 553-568, 573-586, 588-590, 592 and 706-708.

[0717] As used herein, an active fragment of a polypeptide includes a whole or a portion of a polypeptide which is modified by conventional techniques, e.g., mutagenesis, or by addition, deletion, or substitution, but which active fragment exhibits substantially the same structure function, antigenicity, etc., as a polypeptide as described herein.

[0718] In certain illustrative embodiments, the polypeptides of the invention will comprise at least an immunogenic portion of a prostate-specific protein or a variant thereof, as described herein. As noted above, a “prostate-specific protein” is a protein that is expressed by prostate cells. Proteins that are prostate tumor proteins react detectably within an immunoassay (such as an ELISA) with antisera from a patient with prostate cancer. Polypeptides as described herein may be of any length. Additional sequences derived from the native protein and/or heterologous sequences may be present, and such sequences may (but need not) possess further immunogenic or antigenic properties.

[0719] An “immunogenic portion,” as used herein is a portion of a protein that is recognized (i.e., specifically bound) by a B-cell and/or T-cell surface antigen receptor. Such immunogenic portions generally comprise at least 5 amino acid residues, more preferably at least 10, and still more preferably at least 20 amino acid residues of a prostate-specific protein or a variant thereof. Certain preferred immunogenic portions include peptides in which an N-terminal leader sequence and/or transmembrane domain have been deleted. Other preferred immunogenic portions may contain a small N- and/or C-terminal deletion (e.g., 1-30 amino acids, preferably 5-15 amino acids), relative to the mature protein.

[0720] Immunogenic portions may generally be identified using well known techniques, such as those summarized in Paul, Fundamental Immunology, 3rd ed., 243-247 (Raven Press, 1993) and references cited therein. Such techniques include screening polypeptides for the ability to react with antigen-specific antibodies, antisera and/or T-cell lines or clones. As used herein, antisera and antibodies are “antigen-specific” if they specifically bind to an antigen (i.e., they react with the protein in an ELISA or other immunoassay, and do not react detectably with unrelated proteins). Such antisera and antibodies may be prepared as described herein, and using well known techniques. An immunogenic portion of a native prostate-specific protein is a portion that reacts with such antisera and/or T-cells at a level that is not substantially less than the reactivity of the full length polypeptide (e.g., in an ELISA and/or T-cell reactivity assay). Such immunogenic portions may react within such assays at a level that is similar to or greater than the reactivity of the full length polypeptide. Such screens may generally be performed using methods well known to those of ordinary skill in the art, such as those described in Harlow and Lane, Antibodies: A Laboratory Manual, Cold Spring Harbor Laboratory, 1988. For example, a polypeptide may be immobilized on a solid support and contacted with patient sera to allow binding of antibodies within the sera to the immobilized polypeptide. Unbound sera may then be removed and bound antibodies detected using, for example, ¹²⁵I-labeled Protein A.

[0721] As noted above, a composition may comprise a variant of a native prostate-specific protein. A polypeptide “variant,” as used herein, is a polypeptide that differs from a native prostate-specific protein in one or more substitutions, deletions, additions and/or insertions, such that the immunogenicity of the polypeptide is not substantially diminished. In other words, the ability of a variant to react with antigen-specific antisera may be enhanced or unchanged, relative to the native protein, or may be diminished by less than 50%, and preferably less than 20%, relative to the native protein. Such variants may generally be identified by modifying one of the above polypeptide sequences and evaluating the reactivity of the modified polypeptide with antigen-specific antibodies or antisera as described herein. Preferred variants include those in which one or more portions, such as an N-terminal leader sequence or transmembrane domain, have been removed. Other preferred variants include variants in which a small portion (e.g., 1-30 amino acids, preferably 5-15 amino acids) has been removed from the N- and/or C-terminal of the mature protein.

[0722] Polypeptide variants encompassed by the present invention include those exhibiting at least about 70%, 75%, 80%, 85%, 90%, 91%, 92%, 93%, 94%, 95%, 96%, 97%, 98%, or 99% or more identity (determined as described above) to the polypeptides disclosed herein.

[0723] Preferably, a variant contains conservative substitutions. A “conservative substitution” is one in which an amino acid is substituted for another amino acid that has similar properties, such that one skilled in the art of peptide chemistry would expect the secondary structure and hydropathic nature of the polypeptide to be substantially unchanged. Amino acid substitutions may generally be made on the basis of similarity in polarity, charge, solubility, hydrophobicity, hydrophilicity and/or the amphipathic nature of the residues. For example, negatively charged amino acids include aspartic acid and glutamic acid; positively charged amino acids include lysine and arginine; and amino acids with uncharged polar head groups having similar hydrophilicity values include leucine, isoleucine and valine; glycine and alanine; asparagine and glutamine; and serine, threonine, phenylalanine and tyrosine. Other groups of amino acids that may represent conservative changes include: (1) ala, pro, gly, glu, asp, gln, asn, ser, thr; (2) cys, ser, tyr, thr; (3) val, ile, leu, met, ala, phe; (4) lys, arg, his; and (5) phe, tyr, trp, his. A variant may also, or alternatively, contain nonconservative changes. In a preferred embodiment, variant polypeptides differ from a native sequence by substitution, deletion or addition of five amino acids or fewer. Variants may also (or alternatively) be modified by, for example, the deletion or addition of amino acids that have minimal influence on the immunogenicity, secondary structure and hydropathic nature of the polypeptide.

[0724] As noted above, polypeptides may comprise a signal (or leader) sequence at the N-terminal end of the protein, which co-translationally or post-translationally directs transfer of the protein. The polypeptide may also be conjugated to a linker or other sequence for ease of synthesis, purification or identification of the polypeptide (e.g., poly-His), or to enhance binding of the polypeptide to a solid support. For example, a polypeptide may be conjugated to an immunoglobulin Fc region.

[0725] Polypeptides may be prepared using any of a variety of well known techniques. Recombinant polypeptides encoded by DNA sequences as described above may be readily prepared from the DNA sequences using any of a variety of expression vectors known to those of ordinary skill in the art. Expression may be achieved in any appropriate host cell that has been transformed or transfected with an expression vector containing a DNA molecule that encodes a recombinant polypeptide. Suitable host cells include prokaryotes, yeast, and higher eukaryotic cells, such as mammalian cells and plant cells. Preferably, the host cells employed are E. coli, yeast or a mammalian cell line such as COS or CHO. Supernatants from suitable host/vector systems which secrete recombinant protein or polypeptide into culture media may be first concentrated using a commercially available filter. Following concentration, the concentrate may be applied to a suitable purification matrix such as an affinity matrix or an ion exchange resin. Finally, one or more reverse phase HPLC steps can be employed to further purify a recombinant polypeptide.

[0726] Portions and other variants having less than about 100 amino acids, and generally less than about 50 amino acids, may also be generated by synthetic means, using techniques well known to those of ordinary skill in the art. For example, such polypeptides may be synthesized using any of the commercially available solid-phase techniques, such as the Merrifield solid-phase synthesis method, where amino acids are sequentially added to a growing amino acid chain. See Merrifield, J. Am. Chem. Soc. 85:2149-2146, 1963. Equipment for automated synthesis of polypeptides is commercially available from suppliers such as Perkin Elmer/Applied BioSystems Division (Foster City, Calif.), and may be operated according to the manufacturer's instructions.

[0727] Within certain specific embodiments, a polypeptide may be a fusion protein that comprises multiple polypeptides as described herein, or that comprises at least one polypeptide as described herein and an unrelated sequence, such as a known tumor protein. A fusion partner may, for example, assist in providing T helper epitopes (an immunological fusion partner), preferably T helper epitopes recognized by humans, or may assist in expressing the protein (an expression enhancer) at higher yields than the native recombinant protein. Certain preferred fusion partners are both immunological and expression enhancing fusion partners. Other fusion partners may be selected so as to increase the solubility of the protein or to enable the protein to be targeted to desired intracellular compartments. Still further fusion partners include affinity tags, which facilitate purification of the protein.

[0728] Fusion proteins may generally be prepared using standard techniques, including chemical conjugation. Preferably, a fusion protein is expressed as a recombinant protein, allowing the production of increased levels, relative to a non-fused protein, in an expression system. Briefly, DNA sequences encoding the polypeptide components may be assembled separately, and ligated into an appropriate expression vector. The 3′ end of the DNA sequence encoding one polypeptide component is ligated, with or without a peptide linker, to the 5′ end of a DNA sequence encoding the second polypeptide component so that the reading frames of the sequences are in phase. This permits translation into a single fusion protein that retains the biological activity of both component polypeptides.

[0729] A peptide linker sequence may be employed to separate the first and second polypeptide components by a distance sufficient to ensure that each polypeptide folds into its secondary and tertiary structures. Such a peptide linker sequence is incorporated into the fusion protein using standard techniques well known in the art. Suitable peptide linker sequences may be chosen based on the following factors: (1) their ability to adopt a flexible extended conformation; (2) their inability to adopt a secondary structure that could interact with functional epitopes on the first and second polypeptides; and (3) the lack of hydrophobic or charged residues that might react with the polypeptide functional epitopes. Preferred peptide linker sequences contain Gly, Asn and Ser residues. Other near neutral amino acids, such as Thr and Ala may also be used in the linker sequence. Amino acid sequences which may be usefully employed as linkers include those disclosed in Maratea et al., Gene 40:39-46, 1985; Murphy et al., Proc. Natl. Acad. Sci. USA 83:8258-8262, 1986; U.S. Pat. No. 4,935,233 and U.S. Pat. No. 4,751,180. The linker sequence may generally be from 1 to about 50 amino acids in length. Linker sequences are not required when the first and second polypeptides have non-essential N-terminal amino acid regions that can be used to separate the functional domains and prevent steric interference.

[0730] The ligated DNA sequences are operably linked to suitable transcriptional or translational regulatory elements. The regulatory elements responsible for expression of DNA are located only 5′ to the DNA sequence encoding the first polypeptides. Similarly, stop codons required to end translation and transcription termination signals are only present 3′ to the DNA sequence encoding the second polypeptide.

[0731] Fusion proteins are also provided. Such proteins comprise a polypeptide as described herein together with an unrelated immunogenic protein. Preferably the immunogenic protein is capable of eliciting a recall response. Examples of such proteins include tetanus, tuberculosis and hepatitis proteins (see, for example, Stoute et al. New Engl. J. Med., 336:86-91, 1997).

[0732] Within preferred embodiments, an immunological fusion partner is derived from protein D, a surface protein of the gram-negative bacterium Haemophilus influenza B (WO 91/18926). Preferably, a protein D derivative comprises approximately the first third of the protein (e.g., the first N-terminal 100-110 amino acids), and a protein D derivative may be lipidated. Within certain preferred embodiments, the first 109 residues of a Lipoprotein D fusion partner is included on the N-terminus to provide the polypeptide with additional exogenous T-cell epitopes and to increase the expression level in E. coli (thus functioning as an expression enhancer). The lipid tail ensures optimal presentation of the antigen to antigen presenting cells. Other fusion partners include the non-structural protein from influenzae virus, NS1 (hemaglutinin). Typically, the N-terminal 81 amino acids are used, although different fragments that include T-helper epitopes may be used.

[0733] In another embodiment, the immunological fusion partner is the protein known as LYTA, or a portion thereof (preferably a C-terminal portion). LYTA is derived from Streptococcus pneumoniae, which synthesizes an N-acetyl-L-alanine amidase known as amidase LYTA (encoded by the LytA gene; Gene 43:265-292, 1986). LYTA is an autolysin that specifically degrades certain bonds in the peptidoglycan backbone. The C-terminal domain of the LYTA protein is responsible for the affinity to the choline or to some choline analogues such as DEAE. This property has been exploited for the development of E. coli C-LYTA expressing plasmids useful for expression of fusion proteins. Purification of hybrid proteins containing the C-LYTA fragment at the amino terminus has been described (see Biotechnology 10:795-798, 1992). Within a preferred embodiment, a repeat portion of LYTA may be incorporated into a fusion protein. A repeat portion is found in the C-terminal region starting at residue 178. A particularly preferred repeat portion incorporates residues 188-305.

[0734] In general, polypeptides (including fusion proteins) and polynucleotides as described herein are isolated. An “isolated” polypeptide or polynucleotide is one that is removed from its original environment. For example, a naturally-occurring protein is isolated if it is separated from some or all of the coexisting materials in the natural system. Preferably, such polypeptides are at least about 90% pure, more preferably at least about 95% pure and most preferably at least about 99% pure. A polynucleotide is considered to be isolated if, for example, it is cloned into a vector that is not a part of the natural environment.

Binding Agents

[0735] The present invention further provides agents, such as antibodies and antigen-binding fragments thereof, that specifically bind to a prostate-specific protein. As used herein, an antibody, or antigen-binding fragment thereof, is said to “specifically bind” to a prostate-specific protein if it reacts at a detectable level (within, for example, an ELISA) with a prostate-specific protein, and does not react detectably with unrelated proteins under similar conditions. As used herein, “binding” refers to a noncovalent association between two separate molecules such that a complex is formed. The ability to bind may be evaluated by, for example, determining a binding constant for the formation of the complex. The binding constant is the value obtained when the concentration of the complex is divided by the product of the component concentrations. In general, two compounds are said to “bind,” in the context of the present invention, when the binding constant for complex formation exceeds about 10³ mol. The binding constant may be determined using methods well known in the art.

[0736] Binding agents may be further capable of differentiating between patients with and without a cancer, such as prostate cancer, using the representative assays provided herein. In other words, antibodies or other binding agents that bind to a prostate-specific protein will generate a signal indicating the presence of a cancer in at least about 20% of patients with the disease, and will generate a negative signal indicating the absence of the disease in at least about 90% of individuals without the cancer. To determine whether a binding agent satisfies this requirement, biological samples (e.g., blood, sera, sputum, urine and/or tumor biopsies) from patients with and without a cancer (as determined using standard clinical tests) may be assayed as described herein for the presence of polypeptides that bind to the binding agent. It will be apparent that a statistically significant number of samples with and without the disease should be assayed. Each binding agent should satisfy the above criteria; however, those of ordinary skill in the art will recognize that binding agents may be used in combination to improve sensitivity.

[0737] Any agent that satisfies the above requirements may be a binding agent. For example, a binding agent may be a ribosome, with or without a peptide component, an RNA molecule or a polypeptide. In a preferred embodiment, a binding agent is an antibody or an antigen-binding fragment thereof. Antibodies may be prepared by any of a variety of techniques known to those of ordinary skill in the art. See, e.g., Harlow and Lane, Antibodies: A Laboratory Manual, Cold Spring Harbor Laboratory, 1988. In general, antibodies can be produced by cell culture techniques, including the generation of monoclonal antibodies as described herein, or via transfection of antibody genes into suitable bacterial or mammalian cell hosts, in order to allow for the production of recombinant antibodies. In one technique, an immunogen comprising the polypeptide is initially injected into any of a wide variety of mammals (e.g., mice, rats, rabbits, sheep or goats). In this step, the polypeptides of this invention may serve as the immunogen without modification. Alternatively, particularly for relatively short polypeptides, a superior immune response may be elicited if the polypeptide is joined to a carrier protein, such as bovine serum albumin or keyhole limpet hemocyanin. The immunogen is injected into the animal host, preferably according to a predetermined schedule incorporating one or more booster immunizations, and the animals are bled periodically. Polyclonal antibodies specific for the polypeptide may then be purified from such antisera by, for example, affinity chromatography using the polypeptide coupled to a suitable solid support.

[0738] Monoclonal antibodies specific for an antigenic polypeptide of interest may be prepared, for example, using the technique of Kohler and Milstein, Eur. J. Immunol. 6:511-519, 1976, and improvements thereto. Briefly, these methods involve the preparation of immortal cell lines capable of producing antibodies having the desired specificity (i.e., reactivity with the polypeptide of interest). Such cell lines may be produced, for example, from spleen cells obtained from an animal immunized as described above. The spleen cells are then immortalized by, for example, fusion with a myeloma cell fusion partner, preferably one that is syngeneic with the immunized animal. A variety of fusion techniques may be employed. For example, the spleen cells and myeloma cells may be combined with a nonionic detergent for a few minutes and then plated at low density on a selective medium that supports the growth of hybrid cells, but not myeloma cells. A preferred selection technique uses HAT (hypoxanthine, aminopterin, thymidine) selection. After a sufficient time, usually about 1 to 2 weeks, colonies of hybrids are observed. Single colonies are selected and their culture supernatants tested for binding activity against the polypeptide. Hybridomas having high reactivity and specificity are preferred.

[0739] Monoclonal antibodies may be isolated from the supernatants of growing hybridoma colonies. In addition, various techniques may be employed to enhance the yield, such as injection of the hybridoma cell line into the peritoneal cavity of a suitable vertebrate host, such as a mouse. Monoclonal antibodies may then be harvested from the ascites fluid or the blood. Contaminants may be removed from the antibodies by conventional techniques, such as chromatography, gel filtration, precipitation, and extraction. The polypeptides of this invention may be used in the purification process in, for example, an affinity chromatography step.

[0740] Within certain embodiments, the use of antigen-binding fragments of antibodies may be preferred. Such fragments include Fab fragments, which may be prepared using standard techniques. Briefly, immunoglobulins may be purified from rabbit serum by affinity chromatography on Protein A bead columns (Harlow and Lane, Antibodies: A Laboratory Manual, Cold Spring Harbor Laboratory, 1988) and digested by papain to yield Fab and Fc fragments. The Fab and Fc fragments may be separated by affinity chromatography on protein A bead columns.

[0741] Monoclonal antibodies of the present invention may be coupled to one or more therapeutic agents. Suitable agents in this regard include radionuclides, differentiation inducers, drugs, toxins, and derivatives thereof. Preferred radionuclides include ⁹⁰Y, ¹²³I, ¹²⁵I, ¹³¹I, ¹⁸⁶Re, ¹⁸⁸Re, ²¹¹At, and ²¹²Bi. Preferred drugs include methotrexate, and pyrimidine and purine analogs. Preferred differentiation inducers include phorbol esters and butyric acid. Preferred toxins include ricin, abrin, diptheria toxin, cholera toxin, gelonin, Pseudomonas exotoxin, Shigella toxin, and pokeweed antiviral protein.

[0742] A therapeutic agent may be coupled (e.g., covalently bonded) to a suitable monoclonal antibody either directly or indirectly (e.g., via a linker group). A direct reaction between an agent and an antibody is possible when each possesses a substituent capable of reacting with the other. For example, a nucleophilic group, such as an amino or sulflhydryl group, on one may be capable of reacting with a carbonyl-containing group, such as an anhydride or an acid halide, or with an alkyl group containing a good leaving group (e.g., a halide) on the other.

[0743] Alternatively, it may be desirable to couple a therapeutic agent and an antibody via a linker group. A linker group can function as a spacer to distance an antibody from an agent in order to avoid interference with binding capabilities. A linker group can also serve to increase the chemical reactivity of a substituent on an agent or an antibody, and thus increase the coupling efficiency. An increase in chemical reactivity may also facilitate the use of agents, or functional groups on agents, which otherwise would not be possible.

[0744] It will be evident to those skilled in the art that a variety of bifunctional or polyfunctional reagents, both homo- and hetero-functional (such as those described in the catalog of the Pierce Chemical Co., Rockford, Ill.), may be employed as the linker group. Coupling may be effected, for example, through amino groups, carboxyl groups, sulfhydryl groups or oxidized carbohydrate residues. There are numerous references describing such methodology, e.g., U.S. Pat. No. 4,671,958, to Rodwell et al.

[0745] Where a therapeutic agent is more potent when free from the antibody portion of the immunoconjugates of the present invention, it may be desirable to use a linker group which is cleavable during or upon internalization into a cell. A number of different cleavable linker groups have been described. The mechanisms for the intracellular release of an agent from these linker groups include cleavage by reduction of a disulfide bond (e.g., U.S. Pat. No. 4,489,710, to Spitler), by irradiation of a photolabile bond (e.g., U.S. Pat. No. 4,625,014, to Senter et al.), by hydrolysis of derivatized amino acid side chains (e.g., U.S. Pat. No. 4,638,045, to Kohn et al.), by serum complement-mediated hydrolysis (e.g., U.S. Pat. No. 4,671,958, to Rodwell et al.), and acid-catalyzed hydrolysis (e.g., U.S. Pat. No. 4,569,789, to Blattler et al.).

[0746] It may be desirable to couple more than one agent to an antibody. In one embodiment, multiple molecules of an agent are coupled to one antibody molecule. In another embodiment, more than one type of agent may be coupled to one antibody. Regardless of the particular embodiment, immunoconjugates with more than one agent may be prepared in a variety of ways. For example, more than one agent may be coupled directly to an antibody molecule, or linkers that provide multiple sites for attachment can be used. Alternatively, a carrier can be used.

[0747] A carrier may bear the agents in a variety of ways, including covalent bonding either directly or via a linker group. Suitable carriers include proteins such as albumins (e.g., U.S. Pat. No. 4,507,234, to Kato et al.), peptides and polysaccharides such as aminodextran (e.g., U.S. Pat. No. 4,699,784, to Shih et al.). A carrier may also bear an agent by noncovalent bonding or by encapsulation, such as within a liposome vesicle (e.g., U.S. Pat. Nos. 4,429,008 and 4,873,088). Carriers specific for radionuclide agents include radiohalogenated small molecules and chelating compounds. For example, U.S. Pat. No. 4,735,792 discloses representative radiohalogenated small molecules and their synthesis. A radionuclide chelate may be formed from chelating compounds that include those containing nitrogen and sulfur atoms as the donor atoms for binding the metal, or metal oxide, radionuclide. For example, U.S. Pat. No. 4,673,562, to Davison et al. discloses representative chelating compounds and their synthesis.

[0748] A variety of routes of administration for the antibodies and immunoconjugates may be used. Typically, administration will be intravenous, intramuscular, subcutaneous or in the bed of a resected tumor. It will be evident that the precise dose of the antibody/immunoconjugate will vary depending upon the antibody used, the antigen density on the tumor, and the rate of clearance of the antibody.

T Cells

[0749] Immunotherapeutic compositions may also, or alternatively, comprise T cells specific for a prostate-specific protein. Such cells may generally be prepared in vitro or ex vivo, using standard procedures. For example, T cells may be isolated from bone marrow, peripheral blood, or a fraction of bone marrow or peripheral blood of a patient, using a commercially available cell separation system, such as the Isolex™ System, available from Nexell Therapeutics, Inc. (Irvine, Calif.; see also U.S. Pat. No. 5,240,856; U.S. Pat. No. 5,215,926; WO 89/06280; WO 91/16116 and WO 92/07243). Alternatively, T cells may be derived from related or unrelated humans, non-human mammals, cell lines or cultures.

[0750] T cells may be stimulated with a prostate-specific polypeptide, polynucleotide encoding a prostate-specific polypeptide and/or an antigen presenting cell (APC) that expresses such a polypeptide. Such stimulation is performed under conditions and for a time sufficient to permit the generation of T cells that are specific for the polypeptide. Preferably, a prostate-specific polypeptide or polynucleotide is present within a delivery vehicle, such as a microsphere, to facilitate the generation of specific T cells.

[0751] T cells are considered to be specific for a prostate-specific polypeptide if the T cells specifically proliferate, secrete cytokines or kill target cells coated with the polypeptide or expressing a gene encoding the polypeptide. T cell specificity may be evaluated using any of a variety of standard techniques. For example, within a chromium release assay or proliferation assay, a stimulation index of more than two fold increase in lysis and/or proliferation, compared to negative controls, indicates T cell specificity. Such assays may be performed, for example, as described in Chen et al., Cancer Res. 54:1065-1070, 1994. Alternatively, detection of the proliferation of T cells may be accomplished by a variety of known techniques. For example, T cell proliferation can be detected by measuring an increased rate of DNA synthesis (e.g., by pulse-labeling cultures of T cells with tritiated thymidine and measuring the amount of tritiated thymidine incorporated into DNA). Contact with a prostate-specific polypeptide (100 ng/ml-100 μg/ml, preferably 200 ng/ml-25 μg/ml) for 3-7 days should result in at least a two fold increase in proliferation of the T cells. Contact as described above for 2-3 hours should result in activation of the T cells, as measured using standard cytokine assays in which a two fold increase in the level of cytokine release (e.g., TNF or IFN-γ) is indicative of T cell activation (see Coligan et al., Current Protocols in Immunology, vol. 1, Wiley Interscience (Greene 1998)). T cells that have been activated in response to a prostate-specific polypeptide, polynucleotide or polypeptide-expressing APC may be CD4⁺ and/or CD8⁺. Prostate-specific protein-specific T cells may be expanded using standard techniques. Within preferred embodiments, the T cells are derived from a patient, a related donor or an unrelated donor, and are administered to the patient following stimulation and expansion.

[0752] For therapeutic purposes, CD4⁺ or CD8⁺ T cells that proliferate in response to a prostate-specific polypeptide, polynucleotide or APC can be expanded in number either in vitro or in vivo. Proliferation of such T cells in vitro may be accomplished in a variety of ways. For example, the T cells can be re-exposed to a prostate-specific polypeptide, or a short peptide corresponding to an immunogenic portion of such a polypeptide, with or without the addition of T cell growth factors, such as interleukin-2, and/or stimulator cells that synthesize a prostate-specific polypeptide. Alternatively, one or more T cells that proliferate in the presence of a prostate-specific protein can be expanded in number by cloning. Methods for cloning cells are well known in the art, and include limiting dilution.

Pharmaceutical Compositions

[0753] In additional embodiments, the present invention concerns formulation of one or more of the polynucleotide, polypeptide, T-cell and/or antibody compositions disclosed herein in pharmaceutically-acceptable solutions for administration to a cell or an animal, either alone, or in combination with one or more other modalities of therapy.

[0754] It will also be understood that, if desired, the nucleic acid segment, RNA, DNA or PNA compositions that express a polypeptide as disclosed herein may be administered in combination with other agents as well, such as, e.g., other proteins or polypeptides or various pharmaceutically-active agents. In fact, there is virtually no limit to other components that may also be included, given that the additional agents do not cause a significant adverse effect upon contact with the target cells or host tissues. The compositions may thus be delivered along with various other agents as required in the particular instance. Such compositions may be purified from host cells or other biological sources, or alternatively may be chemically synthesized as described herein. Likewise, such compositions may further comprise substituted or derivatized RNA or DNA compositions.

[0755] Formulation of pharmaceutically-acceptable excipients and carrier solutions is well-known to those of skill in the art, as is the development of suitable dosing and treatment regimens for using the particular compositions described herein in a variety of treatment regimens, including e.g., oral, parenteral, intravenous, intranasal, and intramuscular administration and formulation.

1. Oral Delivery

[0756] In certain applications, the pharmaceutical compositions disclosed herein may be delivered via oral administration to an animal. As such, these compositions may be formulated with an inert diluent or with an assimilable edible carrier, or they may be enclosed in hard- or soft-shell gelatin capsule, or they may be compressed into tablets, or they may be incorporated directly with the food of the diet.

[0757] The active compounds may even be incorporated with excipients and used in the form of ingestible tablets, buccal tables, troches, capsules, elixirs, suspensions, syrups, wafers, and the like (Mathiowitz et al., 1997; Hwang et al., 1998; U.S. Pat. No. 5,641,515; U.S. Pat. No. 5,580,579 and U.S. Pat. No. 5,792,451, each specifically incorporated herein by reference in its entirety). The tablets, troches, pills, capsules and the like may also contain the following: a binder, as gum tragacanth, acacia, cornstarch, or gelatin; excipients, such as dicalcium phosphate; a disintegrating agent, such as corn starch, potato starch, alginic acid and the like; a lubricant, such as magnesium stearate; and a sweetening agent, such as sucrose, lactose or saccharin may be added or a flavoring agent, such as peppermint, oil of wintergreen, or cherry flavoring. When the dosage unit form is a capsule, it may contain, in addition to materials of the above type, a liquid carrier. Various other materials may be present as coatings or to otherwise modify the physical form of the dosage unit. For instance, tablets, pills, or capsules may be coated with shellac, sugar, or both. A syrup of elixir may contain the active compound sucrose as a sweetening agent methyl and propylparabens as preservatives, a dye and flavoring, such as cherry or orange flavor. Of course, any material used in preparing any dosage unit form should be pharmaceutically pure and substantially non-toxic in the amounts employed. In addition, the active compounds may be incorporated into sustained-release preparation and formulations.

[0758] Typically, these formulations may contain at least about 0.1% of the active compound or more, although the percentage of the active ingredient(s) may, of course, be varied and may conveniently be between about 1 or 2% and about 60% or 70% or more of the weight or volume of the total formulation. Naturally, the amount of active compound(s) in each therapeutically useful composition may be prepared is such a way that a suitable dosage will be obtained in any given unit dose of the compound. Factors such as solubility, bioavailability, biological half-life, route of administration, product shelf life, as well as other pharmacological considerations will be contemplated by one skilled in the art of preparing such pharmaceutical formulations, and as such, a variety of dosages and treatment regimens may be desirable.

[0759] For oral administration the compositions of the present invention may alternatively be incorporated with one or more excipients in the form of a mouthwash, dentifrice, buccal tablet, oral spray, or sublingual orally-administered formulation. For example, a mouthwash may be prepared incorporating the active ingredient in the required amount in an appropriate solvent, such as a sodium borate solution (Dobell's Solution). Alternatively, the active ingredient may be incorporated into an oral solution such as one containing sodium borate, glycerin and potassium bicarbonate, or dispersed in a dentifrice, or added in a therapeutically-effective amount to a composition that may include water, binders, abrasives, flavoring agents, foaming agents, and humectants. Alternatively the compositions may be fashioned into a tablet or solution form that may be placed under the tongue or otherwise dissolved in the mouth.

2. Injectable Delivery

[0760] In certain circumstances it will be desirable to deliver the pharmaceutical compositions disclosed herein parenterally, intravenously, intramuscularly, or even intraperitoneally as described in U.S. Pat. No. 5,543,158; U.S. Pat. No. 5,641,515 and U.S. Pat. No. 5,399,363 (each specifically incorporated herein by reference in its entirety). Solutions of the active compounds as free base or pharmacologically acceptable salts may be prepared in water suitably mixed with a surfactant, such as hydroxypropylcellulose. Dispersions may also be prepared in glycerol, liquid polyethylene glycols, and mixtures thereof and in oils. Under ordinary conditions of storage and use, these preparations contain a preservative to prevent the growth of microorganisms.

[0761] The pharmaceutical forms suitable for injectable use include sterile aqueous solutions or dispersions and sterile powders for the extemporaneous preparation of sterile injectable solutions or dispersions (U.S. Pat. No. 5,466,468, specifically incorporated herein by reference in its entirety). In all cases the form must be sterile and must be fluid to the extent that easy syringability exists. It must be stable under the conditions of manufacture and storage and must be preserved against the contaminating action of microorganisms, such as bacteria and fungi. The carrier can be a solvent or dispersion medium containing, for example, water, ethanol, polyol (e.g., glycerol, propylene glycol, and liquid polyethylene glycol, and the like), suitable mixtures thereof, and/or vegetable oils. Proper fluidity may be maintained, for example, by the use of a coating, such as lecithin, by the maintenance of the required particle size in the case of dispersion and by the use of surfactants. The prevention of the action of microorganisms can be facilitated by various antibacterial and antifungal agents, for example, parabens, chlorobutanol, phenol, sorbic acid, thimerosal, and the like. In many cases, it will be preferable to include isotonic agents, for example, sugars or sodium chloride. Prolonged absorption of the injectable compositions can be brought about by the use in the compositions of agents delaying absorption, for example, aluminum monostearate and gelatin.

[0762] For parenteral administration in an aqueous solution, for example, the solution should be suitably buffered if necessary and the liquid diluent first rendered isotonic with sufficient saline or glucose. These particular aqueous solutions are especially suitable for intravenous, intramuscular, subcutaneous and intraperitoneal administration. In this connection, a sterile aqueous medium that can be employed will be known to those of skill in the art in light of the present disclosure. For example, one dosage may be dissolved in 1 ml of isotonic NaCl solution and either added to 1000 ml of hypodermoclysis fluid or injected at the proposed site of infusion, (see for example, “Remington's Pharmaceutical Sciences” 15th Edition, pages 1035-1038 and 1570-1580). Some variation in dosage will necessarily occur depending on the condition of the subject being treated. The person responsible for administration will, in any event, determine the appropriate dose for the individual subject. Moreover, for human administration, preparations should meet sterility, pyrogenicity, and the general safety and purity standards as required by FDA Office of Biologics standards.

[0763] Sterile injectable solutions are prepared by incorporating the active compounds in the required amount in the appropriate solvent with various of the other ingredients enumerated above, as required, followed by filtered sterilization. Generally, dispersions are prepared by incorporating the various sterilized active ingredients into a sterile vehicle which contains the basic dispersion medium and the required other ingredients from those enumerated above. In the case of sterile powders for the preparation of sterile injectable solutions, the preferred methods of preparation are vacuum-drying and freeze-drying techniques which yield a powder of the active ingredient plus any additional desired ingredient from a previously sterile-filtered solution thereof.

[0764] The compositions disclosed herein may be formulated in a neutral or salt form. Pharmaceutically-acceptable salts, include the acid addition salts (formed with the free amino groups of the protein) and which are formed with inorganic acids such as, for example, hydrochloric or phosphoric acids, or such organic acids as acetic, oxalic, tartaric, mandelic, and the like. Salts formed with the free carboxyl groups can also be derived from inorganic bases such as, for example, sodium, potassium, ammonium, calcium, or ferric hydroxides, and such organic bases as isopropylamine, trimethylamine, histidine, procaine and the like. Upon formulation, solutions will be administered in a manner compatible with the dosage formulation and in such amount as is therapeutically effective. The formulations are easily administered in a variety of dosage forms such as injectable solutions, drug-release capsules, and the like.

[0765] As used herein, “carrier” includes any and all solvents, dispersion media, vehicles, coatings, diluents, antibacterial and antifungal agents, isotonic and absorption delaying agents, buffers, carrier solutions, suspensions, colloids, and the like. The use of such media and agents for pharmaceutical active substances is well known in the art. Except insofar as any conventional media or agent is incompatible with the active ingredient, its use in the therapeutic compositions is contemplated. Supplementary active ingredients can also be incorporated into the compositions.

[0766] The phrase “pharmaceutically-acceptable” refers to molecular entities and compositions that do not produce an allergic or similar untoward reaction when administered to a human. The preparation of an aqueous composition that contains a protein as an active ingredient is well understood in the art. Typically, such compositions are prepared as injectables, either as liquid solutions or suspensions; solid forms suitable for solution in, or suspension in, liquid prior to injection can also be prepared. The preparation can also be emulsified.

3. Nasal Delivery

[0767] In certain embodiments, the pharmaceutical compositions may be delivered by intranasal sprays, inhalation, and/or other aerosol delivery vehicles. Methods for delivering genes, nucleic acids, and peptide compositions directly to the lungs via nasal aerosol sprays has been described e.g., in U.S. Pat. No. 5,756,353 and U.S. Pat. No. 5,804,212 (each specifically incorporated herein by reference in its entirety). Likewise, the delivery of drugs using intranasal microparticle resins (Takenaga et al., 1998) and lysophosphatidylglycerol compounds (U.S. Pat. No. 5,725,871, specifically incorporated herein by reference in its entirety) are also well-known in the pharmaceutical arts. Likewise, transmucosal drug delivery in the form of a polytetrafluoroetheylene support matrix is described in U.S. Pat. No. 5,780,045 (specifically incorporated herein by reference in its entirety).

4. Liposome-, Nanocapsule-, and Microparticle-Mediated Delivery

[0768] In certain embodiments, the inventors contemplate the use of liposomes, nanocapsules, microparticles, microspheres, lipid particles, vesicles, and the like, for the introduction of the compositions of the present invention into suitable host cells. In particular, the compositions of the present invention may be formulated for delivery either encapsulated in a lipid particle, a liposome, a vesicle, a nanosphere, or a nanoparticle or the like.

[0769] Such formulations may be preferred for the introduction of pharmaceutically-acceptable formulations of the nucleic acids or constructs disclosed herein. The formation and use of liposomes is generally known to those of skill in the art (see for example, Couvreur et al., 1977; Couvreur, 1988; Lasic, 1998; which describes the use of liposomes and nanocapsules in the targeted antibiotic therapy for intracellular bacterial infections and diseases). Recently, liposomes were developed with improved serum stability and circulation half-times (Gabizon and Papahadjopoulos, 1988; Allen and Choun, 1987; U.S. Pat. No. 5,741,516, specifically incorporated herein by reference in its entirety). Further, various methods of liposome and liposome like preparations as potential drug carriers have been reviewed (Takakura, 1998; Chandran et al., 1997; Margalit, 1995; U.S. Pat. No. 5,567,434; U.S. Pat. No. 5,552,157; U.S. Pat. No. 5,565,213; U.S. Pat. No. 5,738,868 and U.S. Pat. No. 5,795,587, each specifically incorporated herein by reference in its entirety).

[0770] Liposomes have been used successfully with a number of cell types that are normally resistant to transfection by other procedures including T cell suspensions, primary hepatocyte cultures and PC 12 cells (Renneisen et al., 1990; Muller et al., 1990). In addition, liposomes are free of the DNA length constraints that are typical of viral-based delivery systems. Liposomes have been used effectively to introduce genes, drugs (Heath and Martin, 1986; Heath et al., 1986; Balazsovits et al., 1989; Fresta and Puglisi, 1996), radiotherapeutic agents (Pikul et al., 1987), enzymes (Imaizumi et al., 1990a; Imaizumi et al., 1990b), viruses (Faller and Baltimore, 1984), transcription factors and allosteric effectors (Nicolau and Gersonde, 1979) into a variety of cultured cell lines and animals. In addition, several successful clinical trails examining the effectiveness of liposome-mediated drug delivery have been completed (Lopez-Berestein et al., 1985a; 1985b; Coune, 1988; Sculier et al., 1988). Furthermore, several studies suggest that the use of liposomes is not associated with autoimmune responses, toxicity or gonadal localization after systemic delivery (Mori and Fukatsu, 1992).

[0771] Liposomes are formed from phospholipids that are dispersed in an aqueous medium and spontaneously form multilamellar concentric bilayer vesicles (also termed multilamellar vesicles (MLVs). MLVs generally have diameters of from 25 nm to 4 μm. Sonication of MLVs results in the formation of small unilamellar vesicles (SUVs) with diameters in the range of 200 to 500 Å, containing an aqueous solution in the core.

[0772] Liposomes bear resemblance to cellular membranes and are contemplated for use in connection with the present invention as carriers for the peptide compositions. They are widely suitable as both water- and lipid-soluble substances can be entrapped, i.e., in the aqueous spaces and within the bilayer itself, respectively. It is possible that the drug-bearing liposomes may even be employed for site-specific delivery of active agents by selectively modifying the liposomal formulation.

[0773] In addition to the teachings of Couvreur et al. (1977; 1988), the following information may be utilized in generating liposomal formulations. Phospholipids can form a variety of structures other than liposomes when dispersed in water, depending on the molar ratio of lipid to water. At low ratios the liposome is the preferred structure. The physical characteristics of liposomes depend on pH, ionic strength and the presence of divalent cations. Liposomes can show low permeability to ionic and polar substances, but at elevated temperatures undergo a phase transition which markedly alters their permeability. The phase transition involves a change from a closely packed, ordered structure, known as the gel state, to a loosely packed, less-ordered structure, known as the fluid state. This occurs at a characteristic phase-transition temperature and results in an increase in permeability to ions, sugars and drugs.

[0774] In addition to temperature, exposure to proteins can alter the permeability of liposomes. Certain soluble proteins, such as cytochrome c, bind, deform and penetrate the bilayer, thereby causing changes in permeability. Cholesterol inhibits this penetration of proteins, apparently by packing the phospholipids more tightly. It is contemplated that the most useful liposome formations for antibiotic and inhibitor delivery will contain cholesterol.

[0775] The ability to trap solutes varies between different types of liposomes. For example, MLVs are moderately efficient at trapping solutes, but SUVs are extremely inefficient. SUVs offer the advantage of homogeneity and reproducibility in size distribution, however, and a compromise between size and trapping efficiency is offered by large unilamellar vesicles (LUVs). These are prepared by ether evaporation and are three to four times more efficient at solute entrapment than MLVs.

[0776] In addition to liposome characteristics, an important determinant in entrapping compounds is the physicochemical properties of the compound itself. Polar compounds are trapped in the aqueous spaces and nonpolar compounds bind to the lipid bilayer of the vesicle. Polar compounds are released through permeation or when the bilayer is broken, but nonpolar compounds remain affiliated with the bilayer unless it is disrupted by temperature or exposure to lipoproteins. Both types show maximum efflux rates at the phase transition temperature.

[0777] Liposomes interact with cells via four different mechanisms: endocytosis by phagocytic cells of the reticuloendothelial system such as macrophages and neutrophils; adsorption to the cell surface, either by nonspecific weak hydrophobic or electrostatic forces, or by specific interactions with cell-surface components; fusion with the plasma cell membrane by insertion of the lipid bilayer of the liposome into the plasma membrane, with simultaneous release of liposomal contents into the cytoplasm; and by transfer of liposomal lipids to cellular or subcellular membranes, or vice versa, without any association of the liposome contents. It often is difficult to determine which mechanism is operative and more than one may operate at the same time.

[0778] The fate and disposition of intravenously injected liposomes depend on their physical properties, such as size, fluidity, and surface charge. They may persist in tissues for h or days, depending on their composition, and half lives in the blood range from min to several h. Larger liposomes, such as MLVs and LUVs, are taken up rapidly by phagocytic cells of the reticuloendothelial system, but physiology of the circulatory system restrains the exit of such large species at most sites. They can exit only in places where large openings or pores exist in the capillary endothelium, such as the sinusoids of the liver or spleen. Thus, these organs are the predominate site of uptake. On the other hand, SUVs show a broader tissue distribution but still are sequestered highly in the liver and spleen. In general, this in vivo behavior limits the potential targeting of liposomes to only those organs and tissues accessible to their large size. These include the blood, liver, spleen, bone marrow, and lymphoid organs.

[0779] Targeting is generally not a limitation in terms of the present invention. However, should specific targeting be desired, methods are available for this to be accomplished. Antibodies may be used to bind to the liposome surface and to direct the antibody and its drug contents to specific antigenic receptors located on a particular cell-type surface. Carbohydrate determinants (glycoprotein or glycolipid cell-surface components that play a role in cell-cell recognition, interaction and adhesion) may also be used as recognition sites as they have potential in directing liposomes to particular cell types. Mostly, it is contemplated that intravenous injection of liposomal preparations would be used, but other routes of administration are also conceivable.

[0780] Alternatively, the invention provides for pharmaceutically-acceptable nanocapsule formulations of the compositions of the present invention. Nanocapsules can generally entrap compounds in a stable and reproducible way (Henry-Michelland et al., 1987; Quintanar-Guerrero et al., 1998; Douglas et al., 1987). To avoid side effects due to intracellular polymeric overloading, such ultrafine particles (sized around 0.1 μm) should be designed using polymers able to be degraded in vivo. Biodegradable polyalkyl-cyanoacrylate nanoparticles that meet these requirements are contemplated for use in the present invention. Such particles may be are easily made, as described (Couvreur et al., 1980; 1988; zur Muhlen et al., 1998; Zambaux et al. 1998; Pinto-Alphandry et al., 1995 and U.S. Pat. No. 5,145,684, specifically incorporated herein by reference in its entirety).

vacclnes

[0781] In certain preferred embodiments of the present invention, vaccines are provided. The vaccines will generally comprise one or more pharmaceutical compositions, such as those discussed above, in combination with an immunostimulant. An immunostimulant may be any substance that enhances or potentiates an immune response (antibody and/or cell-mediated) to an exogenous antigen. Examples of immunostimulants include adjuvants, biodegradable microspheres (e.g., polylactic galactide) and liposomes (into which the compound is incorporated; see e.g., Fullerton, U.S. Pat. No. 4,235,877). Vaccine preparation is generally described in, for example, M. F. Powell and M. J. Newman, eds., “Vaccine Design (the subunit and adjuvant approach),” Plenum Press (NY, 1995). Pharmaceutical compositions and vaccines within the scope of the present invention may also contain other compounds, which may be biologically active or inactive. For example, one or more immunogenic portions of other tumor antigens may be present, either incorporated into a fusion polypeptide or as a separate compound, within the composition or vaccine.

[0782] Illustrative vaccines may contain DNA encoding one or more of the polypeptides as described above, such that the polypeptide is generated in situ. As noted above, the DNA may be present within any of a variety of delivery systems known to those of ordinary skill in the art, including nucleic acid expression systems, bacteria and viral expression systems. Numerous gene delivery techniques are well known in the art, such as those described by Rolland, Crit. Rev. Therap. Drug Carrier Systems 15:143-198, 1998, and references cited therein. Appropriate nucleic acid expression systems contain the necessary DNA sequences for expression in the patient (such as a suitable promoter and terminating signal). Bacterial delivery systems involve the administration of a bacterium (such as Bacillus-Calmette-Guerrin) that expresses an immunogenic portion of the polypeptide on its cell surface or secretes such an epitope. In a preferred embodiment, the DNA may be introduced using a viral expression system (e.g., vaccinia or other pox virus, retrovirus, or adenovirus), which may involve the use of a non-pathogenic (defective), replication competent virus. Suitable systems are disclosed, for example, in Fisher-Hoch et al., Proc. Natl. Acad. Sci. USA 86:317-321, 1989; Flexner et al., Ann. N.Y. Acad. Sci. 569:86-103, 1989; Flexner et al., Vaccine 8:17-21, 1990; U.S. Pat. Nos. 4,603,112, 4,769,330, and 5,017,487; WO 89/01973; U.S. Pat. No. 4,777,127; GB 2,200,651; EP 0,345,242; WO 91/02805; Berkner, Biotechniques 6:616-627, 1988; Rosenfeld et al., Science 252:431-434, 1991; Kolls et al., Proc. Natl. Acad. Sci. USA 91:215-219, 1994; Kass-Eisler et al., Proc. Natl. Acad. Sci. USA 90:11498-11502, 1993; Guzman et al., Circulation 88:2838-2848, 1993; and Guzman et al., Cir. Res. 73:1202-1207, 1993. Techniques for incorporating DNA into such expression systems are well known to those of ordinary skill in the art. The DNA may also be “naked,” as described, for example, in Ulmer et al., Science 259:1745-1749, 1993 and reviewed by Cohen, Science 259:1691-1692, 1993. The uptake of naked DNA may be increased by coating the DNA onto biodegradable beads, which are efficiently transported into the cells. It will be apparent that a vaccine may comprise both a polynucleotide and a polypeptide component. Such vaccines may provide for an enhanced immune response.

[0783] It will be apparent that a vaccine may contain pharmaceutically acceptable salts of the polynucleotides and polypeptides provided herein. Such salts may be prepared from pharmaceutically acceptable non-toxic bases, including organic bases (e.g., salts of primary, secondary and tertiary amines and basic amino acids) and inorganic bases (e.g., sodium, potassium, lithium, ammonium, calcium and magnesium salts).

[0784] While any suitable carrier known to those of ordinary skill in the art may be employed in the vaccine compositions of this invention, the type of carrier will vary depending on the mode of administration. Compositions of the present invention may be formulated for any appropriate manner of administration, including for example, topical, oral, nasal, intravenous, intracranial, intraperitoneal, subcutaneous or intramuscular administration. For parenteral administration, such as subcutaneous injection, the carrier preferably comprises water, saline, alcohol, a fat, a wax or a buffer. For oral administration, any of the above carriers or a solid carrier, such as mannitol, lactose, starch, magnesium stearate, sodium saccharine, talcum, cellulose, glucose, sucrose, and magnesium carbonate, may be employed. Biodegradable microspheres (e.g., polylactate polyglycolate) may also be employed as carriers for the pharmaceutical compositions of this invention. Suitable biodegradable microspheres are disclosed, for example, in U.S. Pat. Nos. 4,897,268; 5,075,109; 5,928,647; 5,811,128; 5,820,883; 5,853,763; 5,814,344 and 5,942,252. One may also employ a carrier comprising the particulate-protein complexes described in U.S. Pat. No. 5,928,647, which are capable of inducing a class I-restrictedcytotoxic T lymphocyte responses in a host.

[0785] Such compositions may also comprise buffers (e.g., neutral buffered saline or phosphate buffered saline), carbohydrates (e.g., glucose, mannose, sucrose or dextrans), mannitol, proteins, polypeptides or amino acids such as glycine, antioxidants, bacteriostats, chelating agents such as EDTA or glutathione, adjuvants (e.g., aluminum hydroxide), solutes that render the formulation isotonic, hypotonic or weakly hypertonic with the blood of a recipient, suspending agents, thickening agents and/or preservatives. Alternatively, compositions of the present invention may be formulated as a lyophilizate. Compounds may also be encapsulated within liposomes using well known technology.

[0786] Any of a variety of immunostimulants may be employed in the vaccines of this invention. For example, an adjuvant may be included. Most adjuvants contain a substance designed to protect the antigen from rapid catabolism, such as aluminum hydroxide or mineral oil, and a stimulator of immune responses, such as lipid A, Bortadella pertussis or Mycobacterium tuberculosis derived proteins. Suitable adjuvants are commercially available as, for example, Freund's Incomplete Adjuvant and Complete Adjuvant (Difco Laboratories, Detroit, Mich.); Merck Adjuvant 65 (Merck and Company, Inc., Rahway, N.J.); AS-2 (SmithKline Beecham, Philadelphia, Pa.); aluminum salts such as aluminum hydroxide gel (alum) or aluminum phosphate; salts of calcium, iron or zinc; an insoluble suspension of acylated tyrosine; acylated sugars; cationically or anionically derivatized polysaccharides; polyphosphazenes; biodegradable microspheres; monophosphoryl lipid A and quil A. Cytokines, such as GM-CSF or interleukin-2, -7, or -12, may also be used as adjuvants.

[0787] Within the vaccines provided herein, the adjuvant composition is preferably designed to induce an immune response predominantly of the Th1 type. High levels of Th1-type cytokines (e.g., IFN-γ, TNFα, IL-2 and IL-12) tend to favor the induction of cell mediated immune responses to an administered antigen. In contrast, high levels of Th2-type cytokines (e.g., IL-4, IL-5, IL-6 and IL-10) tend to favor the induction of humoral immune responses. Following application of a vaccine as provided herein, a patient will support an immune response that includes Th1- and Th2-type responses. Within a preferred embodiment, in which a response is predominantly Th1-type, the level of Th1-type cytokines will increase to a greater extent than the level of Th2-type cytokines. The levels of these cytokines may be readily assessed using standard assays. For a review of the families of cytokines, see Mosmann and Coffman, Ann. Rev. Immunol. 7:145-173, 1989.

[0788] Preferred adjuvants for use in eliciting a predominantly Th1-type response include, for example, a combination of monophosphoryl lipid A, preferably 3-de-O-acylated monophosphoryl lipid A (3D-MPL), together with an aluminum salt. MPL adjuvants are available from Corixa Corporation (Seattle, Wash.; see U.S. Pat. Nos. 4,436,727; 4,877,611; 4,866,034 and 4,912,094). CpG-containing oligonucleotides (in which the CpG dinucleotide is unmethylated) also induce a predominantly Th1 response. Such oligonucleotides are well known and are described, for example, in WO 96/02555, WO 99/33488 and U.S. Pat. Nos. 6,008,200 and 5,856,462. Immunostimulatory DNA sequences are also described, for example, by Sato et al., Science 273:352, 1996. Another preferred adjuvant is a saponin, preferably QS21 (Aquila Biopharmaceuticals Inc., Framingham, Mass.), which may be used alone or in combination with other adjuvants. For example, an enhanced system involves the combination of a monophosphoryl lipid A and saponin derivative, such as the combination of QS21 and 3D-MPL as described in WO 94/00153, or a less reactogenic composition where the QS21 is quenched with cholesterol, as described in WO 96/33739. Other preferred formulations comprise an oil-in-water emulsion and tocopherol. A particularly potent adjuvant formulation involving QS21, 3D-MPL and tocopherol in an oil-in-water emulsion is described in WO 95/17210.

[0789] Other preferred adjuvants include Montanide ISA 720 (Seppic, France), SAF (Chiron, Calif., United States), ISCOMS (CSL), MF-59 (Chiron), the SBAS series of adjuvants (e.g., SBAS-2 or SBAS-4, available from SmithKline Beecham, Rixensart, Belgium), Detox (Corixa, Hamilton, Mont.), RC-529 (Corixa, Hamilton, Mont.) and other aminoalkyl glucosaminide 4-phosphates (AGPs), such as those described in pending U.S. patent application Ser. Nos. 08/853,826 and 09/074,720, the disclosures of which are incorporated herein by reference in their entireties.

[0790] Any vaccine provided herein may be prepared using well known methods that result in a combination of antigen, immune response enhancer and a suitable carrier or excipient. The compositions described herein may be administered as part of a sustained release formulation (i.e., a formulation such as a capsule, sponge or gel (composed of polysaccharides, for example) that effects a slow release of compound following administration). Such formulations may generally be prepared using well known technology (see, e.g., Coombes et al., Vaccine 14:1429-1438, 1996) and administered by, for example, oral, rectal or subcutaneous implantation, or by implantation at the desired target site. Sustained-release formulations may contain a polypeptide, polynucleotide or antibody dispersed in a carrier matrix and/or contained within a reservoir surrounded by a rate controlling membrane.

[0791] Carriers for use within such formulations are biocompatible, and may also be biodegradable; preferably the formulation provides a relatively constant level of active component release. Such carriers include microparticles of poly(lactide-co-glycolide), polyacrylate, latex, starch, cellulose, dextran and the like. Other delayed-release carriers include supramolecular biovectors, which comprise a non-liquid hydrophilic core (e.g., a cross-linked polysaccharide or oligosaccharide) and, optionally, an external layer comprising an amphiphilic compound, such as a phospholipid (see e.g., U.S. Pat. No. 5,151,254 and PCT applications WO 94/20078, WO/94/23701 and WO 96/06638). The amount of active compound contained within a sustained release formulation depends upon the site of implantation, the rate and expected duration of release and the nature of the condition to be treated or prevented.

[0792] Any of a variety of delivery vehicles may be employed within pharmaceutical compositions and vaccines to facilitate production of an antigen-specific immune response that targets tumor cells. Delivery vehicles include antigen presenting cells (APCs), such as dendritic cells, macrophages, B cells, monocytes and other cells that may be engineered to be efficient APCs. Such cells may, but need not, be genetically modified to increase the capacity for presenting the antigen, to improve activation and/or maintenance of the T cell response, to have anti-tumor effects per se and/or to be immunologically compatible with the receiver (i.e., matched HLA haplotype). APCs may generally be isolated from any of a variety of biological fluids and organs, including tumor and peritumoral tissues, and may be autologous, allogeneic, syngeneic or xenogeneic cells.

[0793] Certain preferred embodiments of the present invention use dendritic cells or progenitors thereof as antigen-presenting cells. Dendritic cells are highly potent APCs (Banchereau and Steinman, Nature 392:245-251, 1998) and have been shown to be effective as a physiological adjuvant for eliciting prophylactic or therapeutic antitumor immunity (see Timmerman and Levy, Ann. Rev. Med. 50:507-529, 1999). In general, dendritic cells may be identified based on their typical shape (stellate in situ, with marked cytoplasmic processes (dendrites) visible in vitro), their ability to take up, process and present antigens with high efficiency and their ability to activate naïve T cell responses. Dendritic cells may, of course, be engineered to express specific cell-surface receptors or ligands that are not commonly found on dendritic cells in vivo or ex vivo, and such modified dendritic cells are contemplated by the present invention. As an alternative to dendritic cells, secreted vesicles antigen-loaded dendritic cells (called exosomes) may be used within a vaccine (see Zitvogel et al., Nature Med. 4:594-600, 1998).

[0794] Dendritic cells and progenitors may be obtained from peripheral blood, bone marrow, tumor-infiltrating cells, peritumoral tissues-infiltrating cells, lymph nodes, spleen, skin, umbilical cord blood or any other suitable tissue or fluid. For example, dendritic cells may be differentiated ex vivo by adding a combination of cytokines such as GM-CSF, IL-4, IL-13 and/or TNFα to cultures of monocytes harvested from peripheral blood. Alternatively, CD34 positive cells harvested from peripheral blood, umbilical cord blood or bone marrow may be differentiated into dendritic cells by adding to the culture medium combinations of GM-CSF, IL-3, TNFα, CD40 ligand, LPS, flt3 ligand and/or other compound(s) that induce differentiation, maturation and proliferation of dendritic cells.

[0795] Dendritic cells are conveniently categorized as “immature” and “mature” cells, which allows a simple way to discriminate between two well characterized phenotypes. However, this nomenclature should not be construed to exclude all possible intermediate stages of differentiation. Immature dendritic cells are characterized as APC with a high capacity for antigen uptake and processing, which correlates with the high expression of Fcγ receptor and mannose receptor. The mature phenotype is typically characterized by a lower expression of these markers, but a high expression of cell surface molecules responsible for T cell activation such as class I and class II MHC, adhesion molecules (e.g., CD54 and CD11) and costimulatory molecules (e.g., CD40, CD80, CD86 and 4-1BB).

[0796] APCs may generally be transfected with a polynucleotide encoding a prostate-specific protein (or portion or other variant thereof) such that the prostate-specific polypeptide, or an immunogenic portion thereof, is expressed on the cell surface. Such transfection may take place ex vivo, and a composition or vaccine comprising such transfected cells may then be used for therapeutic purposes, as described herein. Alternatively, a gene delivery vehicle that targets a dendritic or other antigen presenting cell may be administered to a patient, resulting in transfection that occurs in vivo. In vivo and ex vivo transfection of dendritic cells, for example, may generally be performed using any methods known in the art, such as those described in WO 97/24447, or the gene gun approach described by Mahvi et al., Immunology and cell Biology 75:456-460, 1997. Antigen loading of dendritic cells may be achieved by incubating dendritic cells or progenitor cells with the prostate-specific polypeptide, DNA (naked or within a plasmid vector) or RNA; or with antigen-expressing recombinant bacterium or viruses (e.g., vaccinia, fowlpox, adenovirus or lentivirus vectors). Prior to loading, the polypeptide may be covalently conjugated to an immunological partner that provides T cell help (e.g., a carrier molecule). Alternatively, a dendritic cell may be pulsed with a non-conjugated immunological partner, separately or in the presence of the polypeptide.

[0797] Vaccines and pharmaceutical compositions may be presented in unit-dose or multi-dose containers, such as sealed ampoules or vials. Such containers are preferably hermetically sealed to preserve sterility of the formulation until use. In general, formulations may be stored as suspensions, solutions or emulsions in oily or aqueous vehicles. Alternatively, a vaccine or pharmaceutical composition may be stored in a freeze-dried condition requiring only the addition of a sterile liquid carrier immediately prior to use.

Cancer Therapy

[0798] In further aspects of the present invention, the compositions described herein may be used for immunotherapy of cancer, such as prostate cancer. Within such methods, pharmaceutical compositions and vaccines are typically administered to a patient. As used herein, a “patient” refers to any warm-blooded animal, preferably a human. A patient may or may not be afflicted with cancer. Accordingly, the above pharmaceutical compositions and vaccines may be used to prevent the development of a cancer or to treat a patient afflicted with a cancer. A cancer may be diagnosed using criteria generally accepted in the art, including the presence of a malignant tumor. Pharmaceutical compositions and vaccines may be administered either prior to or following surgical removal of primary tumors and/or treatment such as administration of radiotherapy or conventional chemotherapeutic drugs. Administration may be by any suitable method, including administration by intravenous, intraperitoneal, intramuscular, subcutaneous, intranasal, intradermal, anal, vaginal, topical and oral routes.

[0799] Within certain embodiments, immunotherapy may be active immunotherapy, in which treatment relies on the in vivo stimulation of the endogenous host immune system to react against tumors with the administration of immune response-modifying agents (such as polypeptides and polynucleotides as provided herein).

[0800] Within other embodiments, immunotherapy may be passive immunotherapy, in which treatment involves the delivery of agents with established tumor-immune reactivity (such as effector cells or antibodies) that can directly or indirectly mediate antitumor effects and does not necessarily depend on an intact host immune system. Examples of effector cells include T cells as discussed above, T lymphocytes (such as CD8⁺ cytotoxic T lymphocytes and CD4⁺ T-helper tumor-infiltrating lymphocytes), killer cells (such as Natural Killer cells and lymphokine-activated killer cells), B cells and antigen-presenting cells (such as dendritic cells and macrophages) expressing a polypeptide provided herein. T cell receptors and antibody receptors specific for the polypeptides recited herein may be cloned, expressed and transferred into other vectors or effector cells for adoptive immunotherapy. The polypeptides provided herein may also be used to generate antibodies or anti-idiotypic antibodies (as described above and in U.S. Pat. No. 4,918,164) for passive immunotherapy.

[0801] Effector cells may generally be obtained in sufficient quantities for adoptive immunotherapy by growth in vitro, as described herein. Culture conditions for expanding single antigen-specific effector cells to several billion in number with retention of antigen recognition in vivo are well known in the art. Such in vitro culture conditions typically use intermittent stimulation with antigen, often in the presence of cytokines (such as IL-2) and non-dividing feeder cells. As noted above, immunoreactive polypeptides as provided herein may be used to rapidly expand antigen-specific T cell cultures in order to generate a sufficient number of cells for immunotherapy. In particular, antigen-presenting cells, such as dendritic, macrophage, monocyte, fibroblast and/or B cells, may be pulsed with immunoreactive polypeptides or transfected with one or more polynucleotides using standard techniques well known in the art. For example, antigen-presenting cells can be transfected with a polynucleotide having a promoter appropriate for increasing expression in a recombinant virus or other expression system. Cultured effector cells for use in therapy must be able to grow and distribute widely, and to survive long term in vivo. Studies have shown that cultured effector cells can be induced to grow in vivo and to survive long term in substantial numbers by repeated stimulation with antigen supplemented with IL-2 (see, for example, Cheever et al., Immunological Reviews 157:177, 1997).

[0802] Alternatively, a vector expressing a polypeptide recited herein may be introduced into antigen presenting cells taken from a patient and clonally propagated ex vivo for transplant back into the same patient. Transfected cells may be reintroduced into the patient using any means known in the art, preferably in sterile form by intravenous, intracavitary, intraperitoneal or intratumor administration.

[0803] Routes and frequency of administration of the therapeutic compositions described herein, as well as dosage, will vary from individual to individual, and may be readily established using standard techniques. In general, the pharmaceutical compositions and vaccines may be administered by injection (e.g., intracutaneous, intramuscular, intravenous or subcutaneous), intranasally (e.g., by aspiration) or orally. Preferably, between 1 and 10 doses may be administered over a 52 week period. Preferably, 6 doses are administered, at intervals of 1 month, and booster vaccinations may be given periodically thereafter. Alternate protocols may be appropriate for individual patients. A suitable dose is an amount of a compound that, when administered as described above, is capable of promoting an anti-tumor immune response, and is at least 10-50% above the basal (i.e., untreated) level. Such response can be monitored by measuring the anti-tumor antibodies in a patient or by vaccine-dependent generation of cytolytic effector cells capable of killing the patient's tumor cells in vitro. Such vaccines should also be capable of causing an immune response that leads to an improved clinical outcome (e.g., more frequent remissions, complete or partial or longer disease-free survival) in vaccinated patients as compared to non-vaccinated patients. In general, for pharmaceutical compositions and vaccines comprising one or more polypeptides, the amount of each polypeptide present in a dose ranges from about 25 μg to 5 mg per kg of host. Suitable dose sizes will vary with the size of the patient, but will typically range from about 0.1 mL to about 5 mL.

[0804] In general, an appropriate dosage and treatment regimen provides the active compound(s) in an amount sufficient to provide therapeutic and/or prophylactic benefit. Such a response can be monitored by establishing an improved clinical outcome (e.g., more frequent remissions, complete or partial, or longer disease-free survival) in treated patients as compared to non-treated patients. Increases in preexisting immune responses to a prostate-specific protein generally correlate with an improved clinical outcome. Such immune responses may generally be evaluated using standard proliferation, cytotoxicity or cytokine assays, which may be performed using samples obtained from a patient before and after treatment.

Cancer Detection and Diagnosis

[0805] In general, a cancer may be detected in a patient based on the presence of one or more prostate-specific proteins and/or polynucleotides encoding such proteins in a biological sample (for example, blood, sera, sputum urine and/or tumor biopsies) obtained from the patient. In other words, such proteins may be used as markers to indicate the presence or absence of a cancer such as prostate cancer. In addition, such proteins may be useful for the detection of other cancers. The binding agents provided herein generally permit detection of the level of antigen that binds to the agent in the biological sample. Polynucleotide primers and probes may be used to detect the level of mRNA encoding a tumor protein, which is also indicative of the presence or absence of a cancer. In general, a prostate-specific sequence should be present at a level that is at least three fold higher in prostate tissue than in other normal tissues There are a variety of assay formats known to those of ordinary skill in the art for using a binding agent to detect polypeptide markers in a sample. See, e.g., Harlow and Lane, Antibodies: A Laboratory Manual, Cold Spring Harbor Laboratory, 1988. In general, the presence or absence of a cancer in a patient may be determined by (a) contacting a biological sample obtained from a patient with a binding agent; (b) detecting in the sample a level of polypeptide that binds to the binding agent; and (c) comparing the level of polypeptide with a predetermined cut-off value.

[0806] In a preferred embodiment, the assay involves the use of binding agent immobilized on a solid support to bind to and remove the polypeptide from the remainder of the sample. The bound polypeptide may then be detected using a detection reagent that contains a reporter group and specifically binds to the binding agent/polypeptide complex. Such detection reagents may comprise, for example, a binding agent that specifically binds to the polypeptide or an antibody or other agent that specifically binds to the binding agent, such as an anti-immunoglobulin, protein G, protein A or a lectin. Alternatively, a competitive assay may be utilized, in which a polypeptide is labeled with a reporter group and allowed to bind to the immobilized binding agent after incubation of the binding agent with the sample. The extent to which components of the sample inhibit the binding of the labeled polypeptide to the binding agent is indicative of the reactivity of the sample with the immobilized binding agent. Suitable polypeptides for use within such assays include full length prostate-specific proteins and portions thereof to which the binding agent binds, as described above.

[0807] The solid support may be any material known to those of ordinary skill in the art to which the tumor protein may be attached. For example, the solid support may be a test well in a microtiter plate or a nitrocellulose or other suitable membrane. Alternatively, the support may be a bead or disc, such as glass, fiberglass, latex or a plastic material such as polystyrene or polyvinylchloride. The support may also be a magnetic particle or a fiber optic sensor, such as those disclosed, for example, in U.S. Pat. No. 5,359,681. The binding agent may be immobilized on the solid support using a variety of techniques known to those of skill in the art, which are amply described in the patent and scientific literature. In the context of the present invention, the term “immobilization” refers to both noncovalent association, such as adsorption, and covalent attachment (which may be a direct linkage between the agent and functional groups on the support or may be a linkage by way of a cross-linking agent). Immobilization by adsorption to a well in a microtiter plate or to a membrane is preferred. In such cases, adsorption may be achieved by contacting the binding agent, in a suitable buffer, with the solid support for a suitable amount of time. The contact time varies with temperature, but is typically between about 1 hour and about 1 day. In general, contacting a well of a plastic microtiter plate (such as polystyrene or polyvinylchloride) with an amount of binding agent ranging from about 10 ng to about 10 μg, and preferably about 100 ng to about 1 μg, is sufficient to immobilize an adequate amount of binding agent.

[0808] Covalent attachment of binding agent to a solid support may generally be achieved by first reacting the support with a bifunctional reagent that will react with both the support and a functional group, such as a hydroxyl or amino group, on the binding agent. For example, the binding agent may be covalently attached to supports having an appropriate polymer coating using benzoquinone or by condensation of an aldehyde group on the support with an amine and an active hydrogen on the binding partner (see, e.g., Pierce Immunotechnology Catalog and Handbook, 1991, at A 12-A13).

[0809] In certain embodiments, the assay is a two-antibody sandwich assay. This assay may be performed by first contacting an antibody that has been immobilized on a solid support, commonly the well of a microtiter plate, with the sample, such that polypeptides within the sample are allowed to bind to the immobilized antibody. Unbound sample is then removed from the immobilized polypeptide-antibody complexes and a detection reagent (preferably a second antibody capable of binding to a different site on the polypeptide) containing a reporter group is added. The amount of detection reagent that remains bound to the solid support is then determined using a method appropriate for the specific reporter group.

[0810] More specifically, once the antibody is immobilized on the support as described above, the remaining protein binding sites on the support are typically blocked. Any suitable blocking agent known to those of ordinary skill in the art, such as bovine serum albumin or Tween 20™ (Sigma Chemical Co., St. Louis, Mo.). The immobilized antibody is then incubated with the sample, and polypeptide is allowed to bind to the antibody. The sample may be diluted with a suitable diluent, such as phosphate-buffered saline (PBS) prior to incubation. In general, an appropriate contact time (i.e., incubation time) is a period of time that is sufficient to detect the presence of polypeptide within a sample obtained from an individual with prostate cancer. Preferably, the contact time is sufficient to achieve a level of binding that is at least about 95% of that achieved at equilibrium between bound and unbound polypeptide. Those of ordinary skill in the art will recognize that the time necessary to achieve equilibrium may be readily determined by assaying the level of binding that occurs over a period of time. At room temperature, an incubation time of about 30 minutes is generally sufficient.

[0811] Unbound sample may then be removed by washing the solid support with an appropriate buffer, such as PBS containing 0.1% Tween 20™. The second antibody, which contains a reporter group, may then be added to the solid support. Preferred reporter groups include those groups recited above.

[0812] The detection reagent is then incubated with the immobilized antibody-polypeptide complex for an amount of time sufficient to detect the bound polypeptide. An appropriate amount of time may generally be determined by assaying the level of binding that occurs over a period of time. Unbound detection reagent is then removed and bound detection reagent is detected using the reporter group. The method employed for detecting the reporter group depends upon the nature of the reporter group. For radioactive groups, scintillation counting or autoradiographic methods are generally appropriate. Spectroscopic methods may be used to detect dyes, luminescent groups and fluorescent groups. Biotin may be detected using avidin, coupled to a different reporter group (commonly a radioactive or fluorescent group or an enzyme). Enzyme reporter groups may generally be detected by the addition of substrate (generally for a specific period of time), followed by spectroscopic or other analysis of the reaction products.

[0813] To determine the presence or absence of a cancer, such as prostate cancer, the signal detected from the reporter group that remains bound to the solid support is generally compared to a signal that corresponds to a predetermined cut-off value. In one preferred embodiment, the cut-off value for the detection of a cancer is the average mean signal obtained when the immobilized antibody is incubated with samples from patients without the cancer. In general, a sample generating a signal that is three standard deviations above the predetermined cut-off value is considered positive for the cancer. In an alternate preferred embodiment, the cut-off value is determined using a Receiver Operator Curve, according to the method of Sackett et al., Clinical Epidemiology: A Basic Science for Clinical Medicine, Little Brown and Co., 1985, p. 106-7. Briefly, in this embodiment, the cut-off value may be determined from a plot of pairs of true positive rates (i.e., sensitivity) and false positive rates (100%-specificity) that correspond to each possible cut-off value for the diagnostic test result. The cut-off value on the plot that is the closest to the upper left-hand corner (i.e., the value that encloses the largest area) is the most accurate cut-off value, and a sample generating a signal that is higher than the cut-off value determined by this method may be considered positive. Alternatively, the cut-off value may be shifted to the left along the plot, to minimize the false positive rate, or to the right, to minimize the false negative rate. In general, a sample generating a signal that is higher than the cut-off value determined by this method is considered positive for a cancer.

[0814] In a related embodiment, the assay is performed in a flow-through or strip test format, wherein the binding agent is immobilized on a membrane, such as nitrocellulose. In the flow-through test, polypeptides within the sample bind to the immobilized binding agent as the sample passes through the membrane. A second, labeled binding agent then binds to the binding agent-polypeptide complex as a solution containing the second binding agent flows through the membrane. The detection of bound second binding agent may then be performed as described above. In the strip test format, one end of the membrane to which binding agent is bound is immersed in a solution containing the sample. The sample migrates along the membrane through a region containing second binding agent and to the area of immobilized binding agent. Concentration of second binding agent at the area of immobilized antibody indicates the presence of a cancer. Typically, the concentration of second binding agent at that site generates a pattern, such as a line, that can be read visually. The absence of such a pattern indicates a negative result. In general, the amount of binding agent immobilized on the membrane is selected to generate a visually discernible pattern when the biological sample contains a level of polypeptide that would be sufficient to generate a positive signal in the two-antibody sandwich assay, in the format discussed above. Preferred binding agents for use in such assays are antibodies and antigen-binding fragments thereof. Preferably, the amount of antibody immobilized on the membrane ranges from about 25 ng to about 1 μg, and more preferably from about 50 ng to about 500 ng. Such tests can typically be performed with a very small amount of biological sample.

[0815] Of course, numerous other assay protocols exist that are suitable for use with the tumor proteins or binding agents of the present invention. The above descriptions are intended to be exemplary only. For example, it will be apparent to those of ordinary skill in the art that the above protocols may be readily modified to use prostate-specific polypeptides to detect antibodies that bind to such polypeptides in a biological sample. The detection of such prostate-specific protein specific antibodies may correlate with the presence of a cancer.

[0816] A cancer may also, or alternatively, be detected based on the presence of T cells that specifically react with a prostate-specific protein in a biological sample. Within certain methods, a biological sample comprising CD4⁺ and/or CD8⁺ T cells isolated from a patient is incubated with a prostate-specific polypeptide, a polynucleotide encoding such a polypeptide and/or an APC that expresses at least an immunogenic portion of such a polypeptide, and the presence or absence of specific activation of the T cells is detected. Suitable biological samples include, but are not limited to, isolated T cells. For example, T cells may be isolated from a patient by routine techniques (such as by Ficoll/Hypaque density gradient centrifugation of peripheral blood lymphocytes). T cells may be incubated in vitro for 2-9 days (typically 4 days) at 37° C. with polypeptide (e.g., 5-25 μg/ml). It may be desirable to incubate another aliquot of a T cell sample in the absence of prostate-specific polypeptide to serve as a control. For CD4⁺ T cells, activation is preferably detected by evaluating proliferation of the T cells. For CD8⁺ T cells, activation is preferably detected by evaluating cytolytic activity. A level of proliferation that is at least two fold greater and/or a level of cytolytic activity that is at least 20% greater than in disease-free patients indicates the presence of a cancer in the patient.

[0817] As noted above, a cancer may also, or alternatively, be detected based on the level of mRNA encoding a prostate-specific protein in a biological sample. For example, at least two oligonucleotide primers may be employed in a polymerase chain reaction (PCR) based assay to amplify a portion of a prostate-specific cDNA derived from a biological sample, wherein at least one of the oligonucleotide primers is specific for (i.e., hybridizes to) a polynucleotide encoding the prostate-specific protein. The amplified cDNA is then separated and detected using techniques well known in the art, such as gel electrophoresis. Similarly, oligonucleotide probes that specifically hybridize to a polynucleotide encoding a prostate-specific protein may be used in a hybridization assay to detect the presence of polynucleotide encoding the tumor protein in a biological sample.

[0818] To permit hybridization under assay conditions, oligonucleotide primers and probes should comprise an oligonucleotide sequence that has at least about 60%, preferably at least about 75% and more preferably at least about 90%, identity to a portion of a polynucleotide encoding a prostate-specific protein that is at least 10 nucleotides, and preferably at least 20 nucleotides, in length. Preferably, oligonucleotide primers and/or probes hybridize to a polynucleotide encoding a polypeptide described herein under moderately stringent conditions, as defined above. Oligonucleotide primers and/or probes which may be usefully employed in the diagnostic methods described herein preferably are at least 10-40 nucleotides in length. In a preferred embodiment, the oligonucleotide primers comprise at least 10 contiguous nucleotides, more preferably at least 15 contiguous nucleotides, of a DNA molecule having a sequence recited in SEQ ID NO: 1-111, 115-171, 173-175, 177, 179-305, 307-315, 326, 328, 330, 332-335, 340-375, 381, 382 and 384-476, 524, 526, 530, 531, 533, 535, 536, 552, 569-572, 587, 591, 593-606, 618-689 and 690-705. Techniques for both PCR based assays and hybridization assays are well known in the art (see, for example, Mullis et al., Cold Spring Harbor Symp. Quant. Biol., 51:263, 1987; Erlich ed., PCR Technology, Stockton Press, NY, 1989).

[0819] One preferred assay employs RT-PCR, in which PCR is applied in conjunction with reverse transcription. Typically, RNA is extracted from a biological sample, such as biopsy tissue, and is reverse transcribed to produce cDNA molecules. PCR amplification using at least one specific primer generates a cDNA molecule, which may be separated and visualized using, for example, gel electrophoresis. Amplification may be performed on biological samples taken from a test patient and from an individual who is not afflicted with a cancer. The amplification reaction may be performed on several dilutions of cDNA spanning two orders of magnitude. A two-fold or greater increase in expression in several dilutions of the test patient sample as compared to the same dilutions of the non-cancerous sample is typically considered positive.

[0820] In another embodiment, the compositions described herein may be used as markers for the progression of cancer. In this embodiment, assays as described above for the diagnosis of a cancer may be performed over time, and the change in the level of reactive polypeptide(s) or polynucleotide(s) evaluated. For example, the assays may be performed every 24-72 hours for a period of 6 months to 1 year, and thereafter performed as needed. In general, a cancer is progressing in those patients in whom the level of polypeptide or polynucleotide detected increases over time. In contrast, the cancer is not progressing when the level of reactive polypeptide or polynucleotide either remains constant or decreases with time.

[0821] Certain in vivo diagnostic assays may be performed directly on a tumor. One such assay involves contacting tumor cells with a binding agent. The bound binding agent may then be detected directly or indirectly via a reporter group. Such binding agents may also be used in histological applications. Alternatively, polynucleotide probes may be used within such applications.

[0822] As noted above, to improve sensitivity, multiple prostate-specific protein markers may be assayed within a given sample. It will be apparent that binding agents specific for different proteins provided herein may be combined within a single assay. Further, multiple primers or probes may be used concurrently. The selection of tumor protein markers may be based on routine experiments to determine combinations that results in optimal sensitivity. In addition, or alternatively, assays for tumor proteins provided herein may be combined with assays for other known tumor antigens.

Diagnostic Kits

[0823] The present invention further provides kits for use within any of the above diagnostic methods. Such kits typically comprise two or more components necessary for performing a diagnostic assay. Components may be compounds, reagents, containers and/or equipment. For example, one container within a kit may contain a monoclonal antibody or fragment thereof that specifically binds to a prostate-specific protein. Such antibodies or fragments may be provided attached to a support material, as described above. One or more additional containers may enclose elements, such as reagents or buffers, to be used in the assay. Such kits may also, or alternatively, contain a detection reagent as described above that contains a reporter group suitable for direct or indirect detection of antibody binding.

[0824] Alternatively, a kit may be designed to detect the level of mRNA encoding a prostate-specific protein in a biological sample. Such kits generally comprise at least one oligonucleotide probe or primer, as described above, that hybridizes to a polynucleotide encoding a prostate-specific protein. Such an oligonucleotide may be used, for example, within a PCR or hybridization assay. Additional components that may be present within such kits include a second oligonucleotide and/or a diagnostic reagent or container to facilitate the detection of a polynucleotide encoding a prostate-specific protein.

[0825] The following Examples are offered by way of illustration and not by way of limitation.

### EXAMPLES

### Example 1

### Isolation and Characterization of Prostate-Specific Polypeptides

[0826] This Example describes the isolation of certain prostate-specific polypeptides from a prostate tumor cDNA library.

[0827] A human prostate tumor cDNA expression library was constructed from prostate tumor poly A⁺ RNA using a Superscript Plasmid System for cDNA Synthesis and Plasmid Cloning kit (BRL Life Technologies, Gaithersburg, Md. 20897) following the manufacturer's protocol. Specifically, prostate tumor tissues were homogenized with polytron (Kinematica, Switzerland) and total RNA was extracted using Trizol reagent (BRL Life Technologies) as directed by the manufacturer. The poly A⁺ RNA was then purified using a Qiagen oligotex spin column mRNA purification kit (Qiagen, Santa Clarita, Calif. 91355) according to the manufacturer's protocol. First-strand cDNA was synthesized using the NotI/Oligo-dT18 primer. Double-stranded cDNA was synthesized, ligated with EcoRI/BAXI adaptors (Invitrogen, San Diego, Calif.) and digested with NotI. Following size fractionation with Chroma Spin-1000 columns (Clontech, Palo Alto, Calif.), the cDNA was ligated into the EcoRI/NotI site of pCDNA3.1 (Invitrogen) and transformed into ElectroMax E. Coli DH10B cells (BRL Life Technologies) by electroporation.

[0828] Using the same procedure, a normal human pancreas cDNA expression library was prepared from a pool of six tissue specimens (Clontech). The cDNA libraries were characterized by determining the number of independent colonies, the percentage of clones that carried insert, the average insert size and by sequence analysis. The prostate tumor library contained 1.64×10⁷ independent colonies, with 70% of clones having an insert and the average insert size being 1745 base pairs. The normal pancreas cDNA library contained 3.3×10⁶ independent colonies, with 69% of clones having inserts and the average insert size being 1120 base pairs. For both libraries, sequence analysis showed that the majority of clones had a full length cDNA sequence and were synthesized from mRNA, with minimal rRNA and mitochondrial DNA contamination.

[0829] cDNA library subtraction was performed using the above prostate tumor and normal pancreas cDNA libraries, as described by Hara et al. (Blood, 84:189-199, 1994) with some modifications. Specifically, a prostate tumor-specific subtracted cDNA library was generated as follows. Normal pancreas cDNA library (70 μg) was digested with EcoRI, NotI, and SfuI, followed by a filling-in reaction with DNA polymerase Klenow fragment. After phenol-chloroform extraction and ethanol precipitation, the DNA was dissolved in 100 μl of H₂O, heat-denatured and mixed with 100 μl (100 μg) of Photoprobe biotin (Vector Laboratories, Burlingame, Calif.). As recommended by the manufacturer, the resulting mixture was irradiated with a 270 W sunlamp on ice for 20 minutes. Additional Photoprobe biotin (50 μl) was added and the biotinylation reaction was repeated. After extraction with butanol five times, the DNA was ethanol-precipitated and dissolved in 23 μl H₂O to form the driver DNA.

[0830] To form the tracer DNA, 10 μg prostate tumor cDNA library was digested with BamHI and XhoI, phenol chloroform extracted and passed through Chroma spin-400 columns (Clontech). Following ethanol precipitation, the tracer DNA was dissolved in 5 μl H₂O. Tracer DNA was mixed with 15 μl driver DNA and 20 μl of 2× hybridization buffer (1.5 M NaCl/10 mM EDTA/50 mM HEPES pH 7.5/0.2% sodium dodecyl sulfate), overlaid with mineral oil, and heat-denatured completely. The sample was immediately transferred into a 68° C. water bath and incubated for 20 hours (long hybridization [LH]). The reaction mixture was then subjected to a streptavidin treatment followed by phenol/chloroform extraction. This process was repeated three more times. Subtracted DNA was precipitated, dissolved in 12 μl H₂O, mixed with 8 μl driver DNA and 20 μl of 2× hybridization buffer, and subjected to a hybridization at 68° C. for 2 hours (short hybridization [SH]). After removal of biotinylated double-stranded DNA, subtracted cDNA was ligated into BamHI/XhoI site of chloramphenicol resistant pBCSK⁺ (Stratagene, La Jolla, Calif. 92037) and transformed into ElectroMax E. coli DH10B cells by electroporation to generate a prostate tumor specific subtracted cDNA library (referred to as “prostate subtraction 1”).

[0831] To analyze the subtracted cDNA library, plasmid DNA was prepared from 100 independent clones, randomly picked from the subtracted prostate tumor specific library and grouped based on insert size. Representative cDNA clones were further characterized by DNA sequencing with a Perkin Elmer/Applied Biosystems Division Automated Sequencer Model 373A (Foster City, Calif.). Six cDNA clones, hereinafter referred to as F1-13, F1-12, F1-16, H1-1, H1-9 and H1-4, were shown to be abundant in the subtracted prostate-specific cDNA library. The determined 3′ and 5′ cDNA sequences for F1-12 are provided in SEQ ID NO: 2 and 3, respectively, with determined 3′ cDNA sequences for F1-13, F1-16, H1-1, H1-9 and H1-4 being provided in SEQ ID NO: 1 and 4-7, respectively.

[0832] The cDNA sequences for the isolated clones were compared to known sequences in the gene bank using the EMBL and GenBank databases (release 96). Four of the prostate tumor cDNA clones, F1-13, F1-16, H1-1, and H1-4, were determined to encode the following previously identified proteins: prostate specific antigen (PSA), human glandular kallikrein, human tumor expression enhanced gene, and mitochondria cytochrome C oxidase subunit II. H1-9 was found to be identical to a previously identified human autonomously replicating sequence. No significant homologies to the cDNA sequence for F1-12 were found.

[0833] Subsequent studies led to the isolation of a full-length cDNA sequence for F1-12 (also referred to as P504S). This sequence is provided in SEQ ID NO: 107, with the corresponding predicted amino acid sequence being provided in SEQ ID NO: 108. cDNA splice variants of P504S are provided in SEQ ID NO: 600-605.

[0834] To clone less abundant prostate tumor specific genes, cDNA library subtraction was performed by subtracting the prostate tumor cDNA library described above with the normal pancreas cDNA library and with the three most abundant genes in the previously subtracted prostate tumor specific cDNA library: human glandular kallikrein, prostate specific antigen (PSA), and mitochondria cytochrome C oxidase subunit II. Specifically, 1 μg each of human glandular kallikrein, PSA and mitochondria cytochrome C oxidase subunit II cDNAs in pCDNA3.1 were added to the driver DNA and subtraction was performed as described above to provide a second subtracted cDNA library hereinafter referred to as the “subtracted prostate tumor specific cDNA library with spike”.

[0835] Twenty-two cDNA clones were isolated from the subtracted prostate tumor specific cDNA library with spike. The determined 3′ and 5′ cDNA sequences for the clones referred to as J1-17, L1-12, N1-1862, J1-13, J1-19, J1-25, J1-24, K1-58, K1-63, L1-4 and L1-14 are provided in SEQ ID NOS: 8-9, 10-11, 12-13, 14-15, 16-17, 18-19, 20-21, 22-23, 24-25, 26-27 and 28-29, respectively. The determined 3′ cDNA sequences for the clones referred to as J1-12, J1-16, J1-21, K1-48, K1-55, L1-2, L1-6, N1-1858, N1-1860, N1-1861, N1-1864 are provided in SEQ ID NOS: 30-40, respectively. Comparison of these sequences with those in the gene bank as described above, revealed no significant homologies to three of the five most abundant DNA species, (J1-17, L1-12 and N1-1862; SEQ ID NOS: 8-9, 10-11 and 12-13, respectively). Of the remaining two most abundant species, one (J1-12; SEQ ID NO:30) was found to be identical to the previously identified human pulmonary surfactant-associated protein, and the other (K1-48; SEQ ID NO:33) was determined to have some homology to R. norvegicus mRNA for 2-arylpropionyl-CoA epimerase. Of the 17 less abundant cDNA clones isolated from the subtracted prostate tumor specific cDNA library with spike, four (J1-16, K1-55, L1-6 and N1-1864; SEQ ID NOS:31, 34, 36 and 40, respectively) were found to be identical to previously identified sequences, two (J1-21 and N1-1860; SEQ ID NOS: 32 and 38, respectively) were found to show some homology to non-human sequences, and two (L1-2 and N1-1861; SEQ ID NOS: 35 and 39, respectively) were found to show some homology to known human sequences. No significant homologies were found to the polypeptides J1-13, J1-19, J1-24, J1-25, K1-58, K1-63, L1-4, L1-14 (SEQ ID NOS: 14-15, 16-17, 20-21, 18-19, 22-23, 24-25, 26-27, 28-29, respectively).

[0836] Subsequent studies led to the isolation of full length cDNA sequences for J1-17, L1-12 and N1-1862 (SEQ ID NOS: 109-111, respectively). The corresponding predicted amino acid sequences are provided in SEQ ID NOS: 112-114. L1-12 is also referred to as P501S. A cDNA splice variant of P501S is provided in SEQ ID NO: 606.

[0837] In a further experiment, four additional clones were identified by subtracting a prostate tumor cDNA library with normal prostate cDNA prepared from a pool of three normal prostate poly A+ RNA (referred to as “prostate subtraction 2”). The determined cDNA sequences for these clones, hereinafter referred to as U1-3064, U1-3065, V1-3692 and 1A-3905, are provided in SEQ ID NO: 69-72, respectively. Comparison of the determined sequences with those in the gene bank revealed no significant homologies to U1-3065.

[0838] A second subtraction with spike (referred to as “prostate subtraction spike 2”) was performed by subtracting a prostate tumor specific cDNA library with spike with normal pancreas cDNA library and further spiked with PSA, J1-17, pulmonary surfactant-associated protein, mitochondrial DNA, cytochrome c oxidase subunit II, N1-1862, autonomously replicating sequence, L1-12 and tumor expression enhanced gene. Four additional clones, hereinafter referred to as V1-3686, R1-2330, 1B-3976 and V1-3679, were isolated. The determined cDNA sequences for these clones are provided in SEQ ID NO:73-76, respectively. Comparison of these sequences with those in the gene bank revealed no significant homologies to V1-3686 and R1-2330.

[0839] Further analysis of the three prostate subtractions described above (prostate subtraction 2, subtracted prostate tumor specific cDNA library with spike, and prostate subtraction spike 2) resulted in the identification of sixteen additional clones, referred to as 1G-4736, 1G-4738, 1G-4741, 1G-4744, 1G-4734, 1H-4774, 1H-4781, 1H-4785, 1H-4787, 1H-4796, 11-4810, 11-4811, 1J-4876, 1K-4884 and 1K-4896. The determined cDNA sequences for these clones are provided in SEQ ID NOS: 77-92, respectively. Comparison of these sequences with those in the gene bank as described above, revealed no significant homologies to 1G-4741, 1G-4734, 11-4807, 1J-4876 and 1K-4896 (SEQ ID NOS: 79, 81, 87, 90 and 92, respectively). Further analysis of the isolated clones led to the determination of extended cDNA sequences for 1G-4736, 1G-4738, 1G-4741, 1G-4744, 1H-4774, 1H-4781, 1H-4785, 1H-4787, 1H-4796, 11-4807, 1J-4876, 1K-4884 and 1K-4896, provided in SEQ ID NOS: 179-188 and 191-193, respectively, and to the determination of additional partial cDNA sequences for 1I-4810 and 1I-4811, provided in SEQ ID NOS: 189 and 190, respectively.

[0840] Additional studies with prostate subtraction spike 2 resulted in the isolation of three more clones. Their sequences were determined as described above and compared to the most recent GenBank. All three clones were found to have homology to known genes, which are Cysteine-rich protein, KIAA0242, and KIAA0280 (SEQ ID NO: 317, 319, and 320, respectively). Further analysis of these clones by Synteni microarray (Synteni, Palo Alto, Calif.) demonstrated that all three clones were over-expressed in most prostate tumors and prostate BPH, as well as in the majority of normal prostate tissues tested, but low expression in all other normal tissues.

[0841] An additional subtraction was performed by subtracting a normal prostate cDNA library with normal pancreas cDNA (referred to as “prostate subtraction 3”). This led to the identification of six additional clones referred to as 1G-4761, 1G-4762, 1H-4766, 1H-4770, 1H-4771 and 1H-4772 (SEQ ID NOS: 93-98). Comparison of these sequences with those in the gene bank revealed no significant homologies to 1G-4761 and 1H-4771 (SEQ ID NOS: 93 and 97, respectively). Further analysis of the isolated clones led to the determination of extended cDNA sequences for 1G-4761, 1G-4762, 1H-4766 and 1H-4772 provided in SEQ ID NOS: 194-196 and 199, respectively, and to the determination of additional partial cDNA sequences for 1H-4770 and 1H-4771, provided in SEQ ID NOS: 197 and 198, respectively.

[0842] Subtraction of a prostate tumor cDNA library, prepared from a pool of polyA+ RNA from three prostate cancer patients, with a normal pancreas cDNA library (prostate subtraction 4) led to the identification of eight clones, referred to as 1D-4297, 1D-4309, 1D.1-4278, 1D-4288, 1D-4283, 1D-4304, 1D-4296 and 1D-4280 (SEQ ID NOS: 99-107). These sequences were compared to those in the gene bank as described above. No significant homologies were found to 1D-4283 and 1D-4304 (SEQ ID NOS: 103 and 104, respectively). Further analysis of the isolated clones led to the determination of extended cDNA sequences for 1D-4309, 1D.1-4278, 1D-4288, 1D-4283, 1D-4304, 1D-4296 and 1D-4280, provided in SEQ ID NOS: 200-206, respectively.

[0843] cDNA clones isolated in prostate subtraction 1 and prostate subtraction 2, described above, were colony PCR amplified and their mRNA expression levels in prostate tumor, normal prostate and in various other normal tissues were determined using microarray technology (Synteni, Palo Alto, Calif.). Briefly, the PCR amplification products were dotted onto slides in an array format, with each product occupying a unique location in the array. mRNA was extracted from the tissue sample to be tested, reverse transcribed, and fluorescent-labeled cDNA probes were generated. The microarrays were probed with the labeled cDNA probes, the slides scanned and fluorescence intensity was measured. This intensity correlates with the hybridization intensity. Two clones (referred to as P509S and P510S) were found to be over-expressed in prostate tumor and normal prostate and expressed at low levels in all other normal tissues tested (liver, pancreas, skin, bone marrow, brain, breast, adrenal gland, bladder, testes, salivary gland, large intestine, kidney, ovary, lung, spinal cord, skeletal muscle and colon). The determined cDNA sequences for P509S and P510S are provided in SEQ ID NO: 223 and 224, respectively. Comparison of these sequences with those in the gene bank as described above, revealed some homology to previously identified ESTs.

[0844] Additional, studies led to the isolation of the full-length cDNA sequence for P509S. This sequence is provided in SEQ ID NO: 332, with the corresponding predicted amino acid sequence being provided in SEQ ID NO: 339. Two variant full-length cDNA sequences for P510S are provided in SEQ ID NO: 535 and 536, with the corresponding predicted amino acid sequences being provided in SEQ ID NO: 537 and 538, respectively. Additional splice variants of P510S are provided in SEQ ID NO: 598 and 599.

[0845] The determined cDNA sequences for additional prostate-specific clones isolated during characterization of prostate specific cDNA libraries are provided in SEQ ID NO: 618-688 and 690-696. Comparison of these sequences with those in the public databases revealed no significant homologies to any of these sequences.

### Example 2

### Determination of Tissue Specificity of Prostate-Specific Polypeptides

[0846] Using gene specific primers, mRNA expression levels for the representative prostate-specific polypeptides F1-16, H1-1, J1-17 (also referred to as P502S), L1-12 (also referred to as P501S), F1-12 (also referred to as P504S) and N1-1862 (also referred to as P503S) were examined in a variety of normal and tumor tissues using RT-PCR.

[0847] Briefly, total RNA was extracted from a variety of normal and tumor tissues using Trizol reagent as described above. First strand synthesis was carried out using 1-2 μg of total RNA with SuperScript II reverse transcriptase (BRL Life Technologies) at 42° C. for one hour. The cDNA was then amplified by PCR with gene-specific primers. To ensure the semi-quantitative nature of the RT-PCR, β-actin was used as an internal control for each of the tissues examined. First, serial dilutions of the first strand cDNAs were prepared and RT-PCR assays were performed using β-actin specific primers. A dilution was then chosen that enabled the linear range amplification of the β-actin template and which was sensitive enough to reflect the differences in the initial copy numbers. Using these conditions, the β-actin levels were determined for each reverse transcription reaction from each tissue. DNA contamination was minimized by DNase treatment and by assuring a negative PCR result when using first strand cDNA that was prepared without adding reverse transcriptase.

[0848] mRNA Expression levels were examined in four different types of tumor tissue (prostate tumor from 2 patients, breast tumor from 3 patients, colon tumor, lung tumor), and sixteen different normal tissues, including prostate, colon, kidney, liver, lung, ovary, pancreas, skeletal muscle, skin, stomach, testes, bone marrow and brain. F1-16 was found to be expressed at high levels in prostate tumor tissue, colon tumor and normal prostate, and at lower levels in normal liver, skin and testes, with expression being undetectable in the other tissues examined. H1-1 was found to be expressed at high levels in prostate tumor, lung tumor, breast tumor, normal prostate, normal colon and normal brain, at much lower levels in normal lung, pancreas, skeletal muscle, skin, small intestine, bone marrow, and was not detected in the other tissues tested. J1-17 (P502S) and L1-12 (P501S) appear to be specifically over-expressed in prostate, with both genes being expressed at high levels in prostate tumor and normal prostate but at low to undetectable levels in all the other tissues examined. N1-1862 (P503 S) was found to be over-expressed in 60% of prostate tumors and detectable in normal colon and kidney. The RT-PCR results thus indicate that F1-16, H1-1, J1-17 (P502S), N1-1862 (P503S) and L1-12 (P501S) are either prostate specific or are expressed at significantly elevated levels in prostate.

[0849] Further RT-PCR studies showed that F1-12 (P504S) is over-expressed in 60% of prostate tumors, detectable in normal kidney but not detectable in all other tissues tested. Similarly, R1-2330 was shown to be over-expressed in 40% of prostate tumors, detectable in normal kidney and liver, but not detectable in all other tissues tested. U1-3064 was found to be over-expressed in 60% of prostate tumors, and also expressed in breast and colon tumors, but was not detectable in normal tissues.

[0850] RT-PCR characterization of R1-2330, U1-3064 and 1D-4279 showed that these three antigens are over-expressed in prostate and/or prostate tumors.

[0851] Northern analysis with four prostate tumors, two normal prostate samples, two BPH prostates, and normal colon, kidney, liver, lung, pancrease, skeletal muscle, brain, stomach, testes, small intestine and bone marrow, showed that L1-12 (P501S) is over-expressed in prostate tumors and normal prostate, while being undetectable in other normal tissues tested. J1-17 (P502S) was detected in two prostate tumors and not in the other tissues tested. N1-1862 (P503S) was found to be over-expressed in three prostate tumors and to be expressed in normal prostate, colon and kidney, but not in other tissues tested. F1-12 (P504S) was found to be highly expressed in two prostate tumors and to be undetectable in all other tissues tested.

[0852] The microarray technology described above was used to determine the expression levels of representative antigens described herein in prostate tumor, breast tumor and the following normal tissues: prostate, liver, pancreas, skin, bone marrow, brain, breast, adrenal gland, bladder, testes, salivary gland, large intestine, kidney, ovary, lung, spinal cord, skeletal muscle and colon. L1-12 (P501S) was found to be over-expressed in normal prostate and prostate tumor, with some expression being detected in normal skeletal muscle. Both J1-12 and F1-12 (P504S) were found to be over-expressed in prostate tumor, with expression being lower or undetectable in all other tissues tested. N1-1862 (P503S) was found to be expressed at high levels in prostate tumor and normal prostate, and at low levels in normal large intestine and normal colon, with expression being undetectable in all other tissues tested. R1-2330 was found to be over-expressed in prostate tumor and normal prostate, and to be expressed at lower levels in all other tissues tested. 1D-4279 was found to be over-expressed in prostate tumor and normal prostate, expressed at lower levels in normal spinal cord, and to be undetectable in all other tissues tested.

[0853] Further microarray analysis to specifically address the extent to which P501S (SEQ ID NO: 110) was expressed in breast tumor revealed moderate over-expression not only in breast tumor, but also in metastatic breast tumor (2/31), with negligible to low expression in normal tissues. This data suggests that P501S may be over-expressed in various breast tumors as well as in prostate tumors.

[0854] The expression levels of 32 ESTs (expressed sequence tags) described by Vasmatzis et al. (Proc. Natl. Acad. Sci. USA 95:300-304, 1998) in a variety of tumor and normal tissues were examined by microarray technology as described above. Two of these clones (referred to as P1000C and P1001C) were found to be over-expressed in prostate tumor and normal prostate, and expressed at low to undetectable levels in all other tissues tested (normal aorta, thymus, resting and activated PBMC, epithelial cells, spinal cord, adrenal gland, fetal tissues, skin, salivary gland, large intestine, bone marrow, liver, lung, dendritic cells, stomach, lymph nodes, brain, heart, small intestine, skeletal muscle, colon and kidney. The determined cDNA sequences for P1000C and P1001C are provided in SEQ ID NO: 384 and 472, respectively. The sequence of P1001C was found to show some homology to the previously isolated Human mRNA for JM27 protein. No significant homologies were found to the sequence of P1000C.

[0855] The expression of the polypeptide encoded by the full length cDNA sequence for F1-12 (also referred to as P504S; SEQ ID NO: 108) was investigated by immunohistochemical analysis. Rabbit-anti-P504S polyclonal antibodies were generated against the full length P504S protein by standard techniques. Subsequent isolation and characterization of the polyclonal antibodies were also performed by techniques well known in the art. Immunohistochemical analysis showed that the P504S polypeptide was expressed in 100% of prostate carcinoma samples tested (n=5).

[0856] The rabbit-anti-P504S polyclonal antibody did not appear to label benign prostate cells with the same cytoplasmic granular staining, but rather with light nuclear staining. Analysis of normal tissues revealed that the encoded polypeptide was found to be expressed in some, but not all normal human tissues. Positive cytoplasmic staining with rabbit-anti-P504S polyclonal antibody was found in normal human kidney, liver, brain, colon and lung-associated macrophages, whereas heart and bone marrow were negative.

[0857] This data indicates that the P504S polypeptide is present in prostate cancer tissues, and that there are qualitative and quantitative differences in the staining between benign prostatic hyperplasia tissues and prostate cancer tissues, suggesting that this polypeptide may be detected selectively in prostate tumors and therefore be useful in the diagnosis of prostate cancer.

### Example 3

### Isolation and Characterization of Prostate-Specific Polypeptides by PCR-Based Subtraction

[0858] A cDNA subtraction library, containing cDNA from normal prostate subtracted with ten other normal tissue cDNAs (brain, heart, kidney, liver, lung, ovary, placenta, skeletal muscle, spleen and thymus) and then submitted to a first round of PCR amplification, was purchased from Clontech. This library was subjected to a second round of PCR amplification, following the manufacturer's protocol. The resulting cDNA fragments were subcloned into the vector pT7 Blue T-vector (Novagen, Madison, Wis.) and transformed into XL-1 Blue MRF′ E. coli (Stratagene). DNA was isolated from independent clones and sequenced using a Perkin Elmer/Applied Biosystems Division Automated Sequencer Model 373A.

[0859] Fifty-nine positive clones were sequenced. Comparison of the DNA sequences of these clones with those in the gene bank, as described above, revealed no significant homologies to 25 of these clones, hereinafter referred to as P5, P8, P9, P18, P20, P30, P34, P36, P38, P39, P42, P49, P50, P53, P55, P60, P64, P65, P73, P75, P76, P79 and P84. The determined cDNA sequences for these clones are provided in SEQ ID NO: 41-45, 47-52 and 54-65, respectively. P29, P47, P68, P80 and P82 (SEQ ID NO: 46, 53 and 66-68, respectively) were found to show some degree of homology to previously identified DNA sequences. To the best of the inventors' knowledge, none of these sequences have been previously shown to be present in prostate.

[0860] Further studies employing the sequence of SEQ ID NO: 67 as a probe in standard full-length cloning methods, resulted in the isolation of three cDNA sequences which appear to be splice variants of P80 (also known as P704P). These sequences are provided in SEQ ID NO: 698-700.

[0861] Further studies using the PCR-based methodology described above resulted in the isolation of more than 180 additional clones, of which 23 clones were found to show no significant homologies to known sequences. The determined cDNA sequences for these clones are provided in SEQ ID NO: 115-123, 127, 131, 137, 145, 147-151, 153, 156-158 and 160. Twenty-three clones (SEQ ID NO: 124-126, 128-130, 132-136, 138-144, 146, 152, 154, 155 and 159) were found to show some homology to previously identified ESTs. An additional ten clones (SEQ ID NO: 161-170) were found to have some degree of homology to known genes. Larger cDNA clones containing the P20 sequence represent splice variants of a gene referred to as P703P. The determined DNA sequence for the variants referred to as DE1, DE13 and DE14 are provided in SEQ ID NOS: 171, 175 and 177, respectively, with the corresponding predicted amino acid sequences being provided in SEQ ID NO: 172, 176 and 178, respectively. The determined cDNA sequence for an extended spliced form of P703 is provided in SEQ ID NO: 225. The DNA sequences for the splice variants referred to as DE2 and DE6 are provided in SEQ ID NOS: 173 and 174, respectively.

[0862] mRNA Expression levels for representative clones in tumor tissues (prostate (n=5), breast (n=2), colon and lung) normal tissues (prostate (n=5), colon, kidney, liver, lung (n=2), ovary (n=2), skeletal muscle, skin, stomach, small intestine and brain), and activated and non-activated PBMC was determined by RT-PCR as described above. Expression was examined in one sample of each tissue type unless otherwise indicated.

[0863] P9 was found to be highly expressed in normal prostate and prostate tumor compared to all normal tissues tested except for normal colon which showed comparable expression. P20, a portion of the P703P gene, was found to be highly expressed in normal prostate and prostate tumor, compared to all twelve normal tissues tested. A modest increase in expression of P20 in breast tumor (n=2), colon tumor and lung tumor was seen compared to all normal tissues except lung (I of 2). Increased expression of P18 was found in normal prostate, prostate tumor and breast tumor compared to other normal tissues except lung and stomach. A modest increase in expression of P5 was observed in normal prostate compared to most other normal tissues. However, some elevated expression was seen in normal lung and PBMC. Elevated expression of P5 was also observed in prostate tumors (2 of 5), breast tumor and one lung tumor sample. For P30, similar expression levels were seen in normal prostate and prostate tumor, compared to six of twelve other normal tissues tested. Increased expression was seen in breast tumors, one lung tumor sample and one colon tumor sample, and also in normal PBMC. P29 was found to be over-expressed in prostate tumor (5 of 5) and normal prostate (5 of 5) compared to the majority of normal tissues. However, substantial expression of P29 was observed in normal colon and normal lung (2 of 2). P80 was found to be over-expressed in prostate tumor (5 of 5) and normal prostate (5 of 5) compared to all other normal tissues tested, with increased expression also being seen in colon tumor.

[0864] Further studies resulted in the isolation of twelve additional clones, hereinafter referred to as 10-d8, 10-h10, 11-c8, 7-g6, 8-b5, 8-b6, 8-d4, 8-d9, 8-g3, 8-h11, 9-f12 and 9-f3. The determined DNA sequences for 10-d8, 10-h10, 11-c8, 8-d4, 8-d9, 8-h11, 9-f12 and 9-f3 are provided in SEQ ID NO: 207, 208, 209, 216, 217, 220, 221 and 222, respectively. The determined forward and reverse DNA sequences for 7-g6, 8-b5, 8-b6 and 8-g3 are provided in SEQ ID NO: 210 and 211; 212 and 213; 214 and 215; and 218 and 219, respectively. Comparison of these sequences with those in the gene bank revealed no significant homologies to the sequence of 9-f3. The clones 10-d8, 11-c8 and 8-h1 were found to show some homology to previously isolated ESTs, while 10-h10, 8-b5, 8-b6, 8-d4, 8-d9, 8-g3 and 9-f12 were found to show some homology to previously identified genes. Further characterization of 7-G6 and 8-G3 showed identity to the known genes PAP and PSA, respectively.

[0865] mRNA expression levels for these clones were determined using the micro-array technology described above. The clones 7-G6, 8-G3, 8-B5, 8-B6, 8-D4, 8-D9, 9-F3, 9-F12, 9-H3, 10-A2, 10-A4, 11-C9 and 11-F2 were found to be over-expressed in prostate tumor and normal prostate, with expression in other tissues tested being low or undetectable. Increased expression of 8-F11 was seen in prostate tumor and normal prostate, bladder, skeletal muscle and colon. Increased expression of 10-H10 was seen in prostate tumor and normal prostate, bladder, lung, colon, brain and large intestine. Increased expression of 9-B1 was seen in prostate tumor, breast tumor, and normal prostate, salivary gland, large intestine and skin, with increased expression of 11-C8 being seen in prostate tumor, and normal prostate and large intestine.

[0866] An additional cDNA fragment derived from the PCR-based normal prostate subtraction, described above, was found to be prostate specific by both micro-array technology and RT-PCR. The determined cDNA sequence of this clone (referred to as 9-A11) is provided in SEQ ID NO: 226. Comparison of this sequence with those in the public databases revealed 99% identity to the known gene HOXB13.

[0867] Further studies led to the isolation of the clones 8-C6 and 8-H7. The determined cDNA sequences for these clones are provided in SEQ ID NO: 227 and 228, respectively. These sequences were found to show some homology to previously isolated ESTs.

[0868] PCR and hybridization-based methodologies were employed to obtain longer cDNA sequences for clone P20 (also referred to as P703P), yielding three additional cDNA fragments that progressively extend the 5′ end of the gene. These fragments, referred to as P703PDE5, P703P6.26, and P703PX-23 (SEQ ID NO: 326, 328 and 330, with the predicted corresponding amino acid sequences being provided in SEQ ID NO: 327, 329 and 331, respectively) contain additional 5′ sequence. P703PDE5 was recovered by screening of a cDNA library (#141-26) with a portion of P703P as a probe. P703P6.26 was recovered from a mixture of three prostate tumor cDNAs and P703PX_{—}23 was recovered from cDNA library (#438-48). Together, the additional sequences include all of the putative mature serine protease along with part of the putative signal sequence. The putative full-length cDNA sequence for P703P is provided in SEQ ID NO: 524, with the corresponding predicted amino acid sequence being provided in SEQ ID NO: 525.

[0869] Further studies using a PCR-based subtraction library of a prostate tumor pool subtracted against a pool of normal tissues (referred to as JP: PCR subtraction) resulted in the isolation of thirteen additional clones, seven of which did not share any significant homology to known GenBank sequences. The determined cDNA sequences for these seven clones (P711P, P712P, novel 23, P774P, P775P, P710P and P768P) are provided in SEQ ID NO: 307-311, 313 and 315, respectively. The remaining six clones (SEQ ID NO: 316 and 321-325) were shown to share some homology to known genes. By microarray analysis, all thirteen clones showed three or more fold over-expression in prostate tissues, including prostate tumors, BPH and normal prostate as compared to normal non-prostate tissues. Clones P711P, P712P, novel 23 and P768P showed over-expression in most prostate tumors and BPH tissues tested (n=29), and in the majority of normal prostate tissues (n=4), but background to low expression levels in all normal tissues. Clones P774P, P775P and P710P showed comparatively lower expression and expression in fewer prostate tumors and BPH samples, with negative to low expression in normal prostate.

[0870] Further studies led to the isolation of an extended cDNA sequence for P712P (SEQ ID NO: 552). The amino acid sequences encoded by 16 predicted open reading frames present within the sequence of SEQ ID NO: 552 are provided in SEQ ID NO: 553-568.

[0871] The full-length cDNA for P711P was obtained by employing the partial sequence of SEQ ID NO: 307 to screen a prostate cDNA library. Specifically, a directionally cloned prostate cDNA library was prepared using standard techniques. One million colonies of this library were plated onto LB/Amp plates. Nylon membrane filters were used to lift these colonies, and the cDNAs which were picked up by these filters were denatured and cross-linked to the filters by UV light. The P711P cDNA fragment of SEQ ID NO: 307 was radio-labeled and used to hybridize with these filters. Positive clones were selected, and cDNAs were prepared and sequenced using an automatic Perkin Elmer/Applied Biosystems sequencer. The determined full-length sequence of P711P is provided in SEQ ID NO: 382, with the corresponding predicted amino acid sequence being provided in SEQ ID NO: 383.

[0872] Using PCR and hybridization-based methodologies, additional cDNA sequence information was derived for two clones described above, 11-C9 and 9-F3, herein after referred to as P707P and P714P, respectively (SEQ ID NO: 333 and 334). After comparison with the most recent GenBank, P707P was found to be a splice variant of the known gene HoxB13. In contrast, no significant homologies to P714P were found. Further studies employing the sequence of SEQ ID NO: 334 as a probe in standard full-length cloning methods, resulted in an extended cDNA sequence for P714P. This sequence is provided in SEQ ID NO: 697. This sequence was found to show some homology to the gene that encodes human ribosomal L23A protein.

[0873] Clones 8-B3, P89, P98, P130 and P201 (as disclosed in U.S. patent application Ser. No. 09/020,956, filed Feb. 9, 1998) were found to be contained within one contiguous sequence, referred to as P705P (SEQ ID NO: 335, with the predicted amino acid sequence provided in SEQ ID NO: 336), which was determined to be a splice variant of the known gene NKX 3.1.

[0874] Further studies on P775P resulted in the isolation of four additional sequences (SEQ ID NO: 473-476) which are all splice variants of the P775P gene. The sequence of SEQ ID NO: 474 was found to contain two open reading frames (ORFs). The predicted amino acid sequences encoded by these ORFs are provided in SEQ ID NO: 477 and 478. The cDNA sequence of SEQ ID NO: 475 was found to contain an ORF which encodes the amino acid sequence of SEQ ID NO: 479. The cDNA sequence of SEQ ID NO: 473 was found to contain four ORFs. The predicted amino acid sequences encoded by these ORFs are provided in SEQ ID NO: 480-483. Additional splice variants of P775P are provided in SEQ ID NO: 593-597.

[0875] Subsequent studies led to the identification of a genomic region on chromosome 22q11.2, known as the Cat Eye Syndrome region, that contains the five prostate genes P704P, P712P, P774P, P775P and B305D. The relative location of each of these five genes within the genomic region is shown in FIG. 10. This region may therefore be associated with malignant tumors, and other potential tumor genes may be contained within this region. These studies also led to the identification of a potential open reading frame (ORF) for P775P (provided in SEQ ID NO: 533), which encodes the amino acid sequence of SEQ ID NO: 534.

### Example 4

### Synthesis of Polypeptides

[0876] Polypeptides may be synthesized on a Perkin Elmer/Applied Biosystems 430A peptide synthesizer using FMOC chemistry with HPTU (O-Benzotriazole-N,N,N′,N′-tetramethyluronium hexafluorophosphate) activation. A Gly-Cys-Gly sequence may be attached to the amino terminus of the peptide to provide a method of conjugation, binding to an immobilized surface, or labeling of the peptide. Cleavage of the peptides from the solid support may be carried out using the following cleavage mixture: trifluoroacetic acid:ethanedithiol:thioanisole:water:phenol (40:1:2:2:3). After cleaving for 2 hours, the peptides may be precipitated in cold methyl-t-butyl-ether. The peptide pellets may then be dissolved in water containing 0.1% trifluoroacetic acid (TFA) and lyophilized prior to purification by C18 reverse phase HPLC. A gradient of 0%-60% acetonitrile (containing 0.1% TFA) in water (containing 0.1% TFA) may be used to elute the peptides. Following lyophilization of the pure fractions, the peptides may be characterized using electrospray or other types of mass spectrometry and by amino acid analysis.

### Example 5

### Further Isolation and Characterization of Prostate-Specific Polypeptides by PCR-Based Subtraction

[0877] A cDNA library generated from prostate primary tumor mRNA as described above was subtracted with cDNA from normal prostate. The subtraction was performed using a PCR-based protocol (Clontech), which was modified to generate larger fragments. Within this protocol, tester and driver double stranded cDNA were separately digested with five restriction enzymes that recognize six-nucleotide restriction sites (Mlul, MscI, PvuII, SalI and StuI). This digestion resulted in an average cDNA size of 600 bp, rather than the average size of 300 bp that results from digestion with RsaI according to the Clontech protocol. This modification did not affect the subtraction efficiency. Two tester populations were then created with different adapters, and the driver library remained without adapters.

[0878] The tester and driver libraries were then hybridized using excess driver cDNA. In the first hybridization step, driver was separately hybridized with each of the two tester cDNA populations. This resulted in populations of (a) unhybridized tester cDNAs, (b) tester cDNAs hybridized to other tester cDNAs, (c) tester cDNAs hybridized to driver cDNAs and (d) unhybridized driver cDNAs. The two separate hybridization reactions were then combined, and rehybridized in the presence of additional denatured driver cDNA. Following this second hybridization, in addition to populations (a) through (d), a fifth population (e) was generated in which tester cDNA with one adapter hybridized to tester cDNA with the second adapter. Accordingly, the second hybridization step resulted in enrichment of differentially expressed sequences which could be used as templates for PCR amplification with adaptor-specific primers.

[0879] The ends were then filled in, and PCR amplification was performed using adaptor-specific primers. Only population (e), which contained tester cDNA that did not hybridize to driver cDNA, was amplified exponentially. A second PCR amplification step was then performed, to reduce background and further enrich differentially expressed sequences.

[0880] This PCR-based subtraction technique normalizes differentially expressed cDNAs so that rare transcripts that are overexpressed in prostate tumor tissue may be recoverable. Such transcripts would be difficult to recover by traditional subtraction methods.

[0881] In addition to genes known to be overexpressed in prostate tumor, seventy-seven further clones were identified. Sequences of these partial cDNAs are provided in SEQ ID NO: 29 to 305. Most of these clones had no significant homology to database sequences. Exceptions were JPTPN23 (SEQ ID NO: 231; similarity to pig valosin-containing protein), JPTPN30 (SEQ ID NO: 234; similarity to rat mRNA for proteasome subunit), JPTPN45 (SEQ ID NO: 243; similarity to rat norvegicus cytosolic NADP-dependent isocitrate dehydrogenase), JPTPN46 (SEQ ID NO: 244; similarity to human subclone H8 4 d4 DNA sequence), JP1D6 (SEQ ID NO: 265; similarity to G. gallus dynein light chain-A), JP8D6 (SEQ ID NO: 288; similarity to human BAC clone RG016J04), JP8F5 (SEQ ID NO: 289; similarity to human subclone H8 3 b5 DNA sequence), and JP8E9 (SEQ ID NO: 299; similarity to human Alu sequence).

[0882] Additional studies using the PCR-based subtraction library consisting of a prostate tumor pool subtracted against a normal prostate pool (referred to as PT-PN PCR subtraction) yielded three additional clones. Comparison of the cDNA sequences of these clones with the most recent release of GenBank revealed no significant homologies to the two clones referred to as P715P and P767P (SEQ ID NO: 312 and 314). The remaining clone was found to show some homology to the known gene KIAA0056 (SEQ ID NO: 318). Using microarray analysis to measure mRNA expression levels in various tissues, all three clones were found to be over-expressed in prostate tumors and BPH tissues. Specifically, clone P715P was over-expressed in most prostate tumors and BPH tissues by a factor of three or greater, with elevated expression seen in the majority of normal prostate samples and in fetal tissue, but negative to low expression in all other normal tissues. Clone P767P was over-expressed in several prostate tumors and BPH tissues, with moderate expression levels in half of the normal prostate samples, and background to low expression in all other normal tissues tested.

[0883] Further analysis, by microarray as described above, of the PT-PN PCR subtraction library and of a DNA subtraction library containing cDNA from prostate tumor subtracted with a pool of normal tissue cDNAs, led to the isolation of 27 additional clones (SEQ ID NO: 340-365 and 381) which were determined to be over-expressed in prostate tumor. The clones of SEQ ID NO: 341, 342, 345, 347, 348, 349, 351, 355-359, 361, 362 and 364 were also found to be expressed in normal prostate. Expression of all 26 clones in a variety of normal tissues was found to be low or undetectable, with the exception of P544S (SEQ ID NO: 356) which was found to be expressed in small intestine. Of the 26 clones, 11 (SEQ ID NO: 340-349 and 362) were found to show some homology to previously identified sequences. No significant homologies were found to the clones of SEQ ID NO: 350, 351, 353-361, and 363-365. The full length cDNA sequence of the clone of SEQ ID NO: 362 (referred to as P788P) is shown in FIG. 12A, with the corresponding predicted amino acid being shown in FIG. 12B.

[0884] Further studies on the clone of SEQ ID NO: 352 (referred to as P790P) led to the isolation of the full-length cDNA sequence of SEQ ID NO: 526. The corresponding predicted amino acid is provided in SEQ ID NO: 527. Data from two quantitative PCR experiments indicated that P790P is over-expressed in 11/15 tested prostate tumor samples and is expressed at low levels in spinal cord, with no expression being seen in all other normal samples tested. Data from further PCR experiments and microarray experiments showed over-expression in normal prostate and prostate tumor with little or no expression in other tissues tested. P790P was subsequently found to show significant homology to a previously identified G-protein coupled prostate tissue receptor.

[0885] Additional studies on the clone of SEQ ID NO: 354 (referred to as P776P) led to the isolation of an extended cDNA sequence, provided in SEQ ID NO: 569. The determined cDNA sequences of three additional splice variants of P776P are provided in SEQ ID NO: 570-572. The amino acid sequences encoded by two predicted open reading frames (ORFs) contained within SEQ ID NO: 570, one predicted ORF contained within SEQ ID NO: 571, and 11 predicted ORFs contained within SEQ ID NO: 569, are provided in SEQ ID NO: 573-586, respectively.

[0886] Comparison of the cDNA sequences for the clones P767P (SEQ ID NO: 314) and P777P (SEQ ID NO: 350) with sequences in the GenBank human EST database showed that the two clones matched many EST sequences in common, suggesting that P767P and P777P may represent the same gene. A DNA consensus sequence derived from a DNA sequence alignment of P767P, P777P and multiple EST clones is provided in SEQ ID NO: 587. The amino acid sequences encoded by three putative ORFs located within SEQ ID NO: 587 are provided in SEQ ID NO: 588-590.

### Example 6

### Peptide Priming of Mice and Propagation of CTL Lines

[0887] 6.1. This Example illustrates the preparation of a CTL cell line specific for cells expressing the P502S gene.

[0888] Mice expressing the transgene for human HLA A2 Kb (provided by Dr L. Sherman, The Scripps Research Institute, La Jolla, Calif.) were immunized with P2S#12 peptide (VLGWVAEL; SEQ ID NO: 306), which is derived from the P502S gene (also referred to herein as J1-17, SEQ ID NO: 8), as described by Theobald et al., Proc. Natl. Acad. Sci. USA 92:11993-11997, 1995 with the following modifications. Mice were immunized with 100 μg of P2S#12 and 120 μg of an I-A^{b} binding peptide derived from hepatitis B Virus protein emulsified in incomplete Freund's adjuvant. Three weeks later these mice were sacrificed and using a nylon mesh single cell suspensions prepared. Cells were then resuspended at 6×10⁶ cells/ml in complete media (RPMI-1640; Gibco BRL, Gaithersburg, Md.) containing 10% FCS, 2 mM Glutamine (Gibco BRL), sodium pyruvate (Gibco BRL), non-essential amino acids (Gibco BRL), 2×10⁻⁵ M 2-mercaptoethanol, 50 U/ml penicillin and streptomycin, and cultured in the presence of irradiated (3000 rads) P2S#12-pulsed (5 mg/ml P2S#12 and 10 mg/ml β2-microglobulin) LPS blasts (A2 transgenic spleens cells cultured in the presence of 7 μg/ml dextran sulfate and 25 μg/ml LPS for 3 days). Six days later, cells (5×10⁵/ml) were restimulated with 2.5×10⁶/ml peptide pulsed irradiated (20,000 rads) EL4A2 Kb cells (Sherman et al, Science 258:815-818, 1992) and 3×10⁶/ml A2 transgenic spleen feeder cells. Cells were cultured in the presence of 20 U/ml IL-2. Cells continued to be restimulated on a weekly basis as described, in preparation for cloning the line.

[0889] P2S#12 line was cloned by limiting dilution analysis with peptide pulsed EL4 A2 Kb tumor cells (1×10⁴ cells/well) as stimulators and A2 transgenic spleen cells as feeders (5×10⁵ cells/well) grown in the presence of 30 U/ml IL-2. On day 14, cells were restimulated as before. On day 21, clones that were growing were isolated and maintained in culture. Several of these clones demonstrated significantly higher reactivity (lysis) against human fibroblasts (HLA A2 Kb expressing) transduced with P502S than against control fibroblasts. An example is presented in FIG. 1.

[0890] This data indicates that P2S #12 represents a naturally processed epitope of the P502S protein that is expressed in the context of the human HLA A2 Kb molecule.

[0891] 6.2. This Example illustrates the preparation of murine CTL lines and CTL clones specific for cells expressing the P501S gene.

[0892] This series of experiments were performed similarly to that described above. Mice were immunized with the P1S#10 peptide (SEQ ID NO: 337), which is derived from the P501S gene (also referred to herein as L1-12, SEQ ID NO: 110). The P1S#10 peptide was derived by analysis of the predicted polypeptide sequence for P501S for potential HLA-A2 binding sequences as defined by published HLA-A2 binding motifs (Parker, K C, et al, J. Immunol., 152:163, 1994). P1S#10 peptide was synthesized as described in Example 4, and empirically tested for HLA-A2 binding using a T cell based competition assay. Predicted A2 binding peptides were tested for their ability to compete HLA-A2 specific peptide presentation to an HLA-A2 restricted CTL clone (D150M58), which is specific for the HLA-A2 binding influenza matrix peptide fluM58. D150M58 CTL secretes TNF in response to self-presentation of peptide fluM58. In the competition assay, test peptides at 100-200 μg/ml were added to cultures of D150M58 CTL in order to bind HLA-A2 on the CTL. After thirty minutes, CTL cultured with test peptides, or control peptides, were tested for their antigen dose response to the fluM58 peptide in a standard TNF bioassay. As shown in FIG. 3, peptide P1S#10 competes HLA-A2 restricted presentation of fluM58, demonstrating that peptide P1S#10 binds HLA-A2.

[0893] Mice expressing the transgene for human HLA A2 Kb were immunized as described by Theobald et al. (Proc. Natl. Acad. Sci. USA 92:11993-11997, 1995) with the following modifications. Mice were immunized with 62.5 μg of PIS #10 and 120 μg of an I-Ab binding peptide derived from Hepatitis B Virus protein emulsified in incomplete Freund's adjuvant. Three weeks later these mice were sacrificed and single cell suspensions prepared using a nylon mesh. Cells were then resuspended at 6×10⁶ cells/ml in complete media (as described above) and cultured in the presence of irradiated (3000 rads) P1S#10-pulsed (2 μg/ml P1S#10 and 10 mg/ml β2-microglobulin) LPS blasts (A2 transgenic spleens cells cultured in the presence of 7 μg/ml dextran sulfate and 25 μg/ml LPS for 3 days). Six days later cells (5×10⁵/ml) were restimulated with 2.5×10⁶/ml peptide-pulsed irradiated (20,000 rads) EL4A2 Kb cells, as described above, and 3×10⁶/ml A2 transgenic spleen feeder cells. Cells were cultured in the presence of 20 U/ml IL-2. Cells were restimulated on a weekly basis in preparation for cloning. After three rounds of in vitro stimulations, one line was generated that recognized P1S#10-pulsed Jurkat A2 Kb targets and P501S-transduced Jurkat targets as shown in FIG. 4.

[0894] A P1S#10-specific CTL line was cloned by limiting dilution analysis with peptide pulsed EL4 A2 Kb tumor cells (1×10⁴ cells/well) as stimulators and A2 transgenic spleen cells as feeders (5×10⁵ cells/well) grown in the presence of 30 U/ml IL-2. On day 14, cells were restimulated as before. On day 21, viable clones were isolated and maintained in culture. As shown in FIG. 5, five of these clones demonstrated specific cytolytic reactivity against P501S-transduced Jurkat A2 Kb targets. This data indicates that P1S#l 0 represents a naturally processed epitope of the P501S protein that is expressed in the context of the human HLA-A2.1 molecule.

### Example 7

### Priming of CTL In Vivo Using Naked DNA Immunization with a Prostate Antigen

[0895] The prostate-specific antigen L1-12, as described above, is also referred to as P501S. HLA A2 Kb Tg mice (provided by Dr L. Sherman, The Scripps Research Institute, La Jolla, Calif.) were immunized with 100 μg P501S in the vector VR1012 either intramuscularly or intradermally. The mice were immunized three times, with a two week interval between immunizations. Two weeks after the last immunization, immune spleen cells were cultured with Jurkat A2 Kb-P501S transduced stimulator cells. CTL lines were stimulated weekly. After two weeks of in vitro stimulation, CTL activity was assessed against P501S transduced targets. Two out of 8 mice developed strong anti-P501S CTL responses. These results demonstrate that P501S contains at least one naturally processed HLA-A2-restricted CTL epitope.

### Example 8

### Ability of Human T Cells to Recognize Prostate-Specific Polypeptides

[0896] This Example illustrates the ability of T cells specific for a prostate tumor polypeptide to recognize human tumor.

[0897] Human CD8⁺ T cells were primed in vitro to the P2S-12 peptide (SEQ ID NO: 306) derived from P502S (also referred to as J1-17) using dendritic cells according to the protocol of Van Tsai et al. (Critical Reviews in Immunology 18:65-75, 1998). The resulting CD8⁺ T cell microcultures were tested for their ability to recognize the P2S-12 peptide presented by autologous fibroblasts or fibroblasts which were transduced to express the P502S gene in a γ-interferon ELISPOT assay (see Lalvani et al., J. Exp. Med. 186:859-865, 1997). Briefly, titrating numbers of T cells were assayed in duplicate on 10⁴ fibroblasts in the presence of 3 μg/ml human β₂-microglobulin and 1 μg/ml P2S-12 peptide or control E75 peptide. In addition, T cells were simultaneously assayed on autologous fibroblasts transduced with the P502S gene or as a control, fibroblasts transduced with HER-2/neu. Prior to the assay, the fibroblasts were treated with 10 ng/ml γ-interferon for 48 hours to upregulate class I MHC expression. One of the microcultures (#5) demonstrated strong recognition of both peptide pulsed fibroblasts as well as transduced fibroblasts in a γ-interferon ELISPOT assay. FIG. 2A demonstrates that there was a strong increase in the number of γ-interferon spots with increasing numbers of T cells on fibroblasts pulsed with the P2S-12 peptide (solid bars) but not with the control E75 peptide (open bars). This shows the ability of these T cells to specifically recognize the P2S-12 peptide. As shown in FIG. 2B, this microculture also demonstrated an increase in the number of γ-interferon spots with increasing numbers of T cells on fibroblasts transduced to express the P502S gene but not the HER-2/neu gene. These results provide additional confirmatory evidence that the P2S-12 peptide is a naturally processed epitope of the P502S protein. Furthermore, this also demonstrates that there exists in the human T cell repertoire, high affinity T cells which are capable of recognizing this epitope. These T cells should also be capable of recognizing human tumors which express the P502S gene.

### Example 9

### Elicitation of Prostate Antigen-Specific CTL Responses In Human Blood

[0898] This Example illustrates the ability of a prostate-specific antigen to elicit a CTL response in blood of normal humans.

[0899] Autologous dendritic cells (DC) were differentiated from monocyte cultures derived from PBMC of normal donors by growth for five days in RPMI medium containing 10% human serum, 50 ng/ml GMCSF and 30 ng/ml IL-4. Following culture, DC were infected overnight with recombinant P501S-expressing vaccinia virus at an M.O.I. of 5 and matured for 8 hours by the addition of 2 micrograms/ml CD40 ligand. Virus was inactivated by UV irradiation, CD8⁺ cells were isolated by positive selection using magnetic beads, and priming cultures were initiated in 24-well plates. Following five stimulation cycles using autologous fibroblasts retrovirally transduced to express P501S and CD80, CD8+ lines were identified that specifically produced interferon-gamma when stimulated with autologous P501S-transduced fibroblasts. The P501S-specific activity of cell line 3A-1 could be maintained following additional stimulation cycles on autologous B-LCL transduced with P501S. Line 3A-1 was shown to specifically recognize autologous B-LCL transduced to express P501S, but not EGFP-transduced autologous B-LCL, as measured by cytotoxicity assays (⁵¹Cr release) and interferon-gamma production (Interferon-gamma Elispot; see above and Lalvani et al., J. Exp. Med. 186:859-865, 1997). The results of these assays are presented in FIGS. 6A and 6B.

### Example 10

### Identification of a Naturally Processed CTL Epitope Contained within a Prostate-Specific Antigen

[0900] The 9-mer peptide p5 (SEQ ID NO: 338) was derived from the P703P antigen (also referred to as P20). The p5 peptide is immunogenic in human HLA-A2 donors and is a naturally processed epitope. Antigen specific human CD8+ T cells can be primed following repeated in vitro stimulations with monocytes pulsed with p5 peptide. These CTL specifically recognize p5-pulsed and P703P-transduced target cells in both ELISPOT (as described above) and chromium release assays. Additionally, immunization of HLA-A2 Kb transgenic mice with p5 leads to the generation of CTL lines which recognize a variety of HLA-A2 Kb or HLA-A2 transduced target cells expressing P703P.

[0901] Initial studies demonstrating that p5 is a naturally processed epitope were done using HLA-A2 Kb transgenic mice. HLA-A2 Kb transgenic mice were immunized subcutaneously in the footpad with 100 μg of p5 peptide together with 140 μg of hepatitis B virus core peptide (a Th peptide) in Freund's incomplete adjuvant. Three weeks post immunization, spleen cells from immunized mice were stimulated in vitro with peptide-pulsed LPS blasts. CTL activity was assessed by chromium release assay five days after primary in vitro stimulation. Retrovirally transduced cells expressing the control antigen P703P and HLA-A2 Kb were used as targets. CTL lines that specifically recognized both p5-pulsed targets as well as P703P-expressing targets were identified.

[0902] Human in vitro priming experiments demonstrated that the p5 peptide is immunogenic in humans. Dendritic cells (DC) were differentiated from monocyte cultures derived from PBMC of normal human donors by culturing for five days in RPMI medium containing 10% human serum, 50 ng/ml human GM-CSF and 30 ng/ml human IL-4. Following culture, the DC were pulsed with 1 ug/ml p5 peptide and cultured with CD8+ T cell enriched PBMC. CTL lines were restimulated on a weekly basis with p5-pulsed monocytes. Five to six weeks after initiation of the CTL cultures, CTL recognition of p5-pulsed target cells was demonstrated. CTL were additionally shown to recognize human cells transduced to express P703P, demonstrating that p5 is a naturally processed epitope.

### Example 11

### Expression of a Breast Tumor-Derived Antigen in Prostate

[0903] Isolation of the antigen B305D from breast tumor by differential display is described in U.S. patent application Ser. No. 08/700,014, filed Aug. 20, 1996. Several different splice forms of this antigen were isolated. The determined cDNA sequences for these splice forms are provided in SEQ ID NO: 366-375, with the predicted amino acid sequences corresponding to the sequences of SEQ ID NO: 292, 298 and 301-303 being provided in SEQ ID NO: 299-306, respectively. In further studies, a splice variant of the cDNA sequence of SEQ ID NO: 366 was isolated which was found to contain an additional guanine residue at position 884 (SEQ ID NO: 530), leading to a frameshift in the open reading frame. The determined DNA sequence of this ORF is provided in SEQ ID NO: 531. This frameshift generates a protein sequence (provided in SEQ ID NO: 532) of 293 amino acids that contains the C-terminal domain common to the other isoforms of B305D but that differs in the N-terminal region.

[0904] The expression levels of B305D in a variety of tumor and normal tissues were examined by real time PCR and by Northern analysis. The results indicated that B305D is highly expressed in breast tumor, prostate tumor, normal prostate and normal testes, with expression being low or undetectable in all other tissues examined (colon tumor, lung tumor, ovary tumor, and normal bone marrow, colon, kidney, liver, lung, ovary, skin, small intestine, stomach). Using real-time PCR on a panel of prostate tumors, expression of B305D in prostate tumors was shown to increase with increasing Gleason grade, demonstrating that expression of B305D increases as prostate cancer progresses.

### Example 12

### Generation of Human CTL In Vitro Using Whole Gene Priming and Stimulation Techniques with Prostate-Specific Antigen

[0905] Using in vitro whole-gene priming with P501S-vaccinia infected DC (see, for example, Yee et al, The Journal of Immunology, 157(9):4079-86, 1996), human CTL lines were derived that specifically recognize autologous fibroblasts transduced with P501S (also known as L1-12), as determined by interferon-γ ELISPOT analysis as described above. Using a panel of HLA-mismatched B-LCL lines transduced with P501S, these CTL lines were shown to be likely restricted to HLAB class I allele. Specifically, dendritic cells (DC) were differentiated from monocyte cultures derived from PBMC of normal human donors by growing for five days in RPMI medium containing 10% human serum, 50 ng/ml human GM-CSF and 30 ng/ml human IL-4. Following culture, DC were infected overnight with recombinant P501S vaccinia virus at a multiplicity of infection (M.O.I) of five, and matured overnight by the addition of 3 μg/ml CD40 ligand. Virus was inactivated by UV irradiation. CD8+ T cells were isolated using a magnetic bead system, and priming cultures were initiated using standard culture techniques. Cultures were restimulated every 7-10 days using autologous primary fibroblasts retrovirally transduced with P501S and CD80. Following four stimulation cycles, CD8+ T cell lines were identified that specifically produced interferon-γ when stimulated with P501S and CD80-transduced autologous fibroblasts. A panel of HLA-mismatched B-LCL lines transduced with P501S were generated to define the restriction allele of the response. By measuring interferon-γ in an ELISPOT assay, the P501S specific response was shown to be likely restricted by HLA B alleles. These results demonstrate that a CD8+ CTL response to P501S can be elicited.

[0906] To identify the epitope(s) recognized, cDNA encoding P501S was fragmented by various restriction digests, and sub-cloned into the retroviral expression vector pBIB-KS. Retroviral supernatants were generated by transfection of the helper packaging line Phoenix-Ampho. Supernatants were then used to transduce Jurkat/A2 Kb cells for CTL screening. CTL were screened in IFN-gamma ELISPOT assays against these A2 Kb targets transduced with the “library” of P501S fragments. Initial positive fragments P501S/H3 and P501S/F2 were sequenced and found to encode amino acids 106-553 and amino acids 136-547, respectively, of SEQ ID NO: 113. A truncation of H3 was made to encode amino acid residues 106-351 of SEQ ID NO: 113, which was unable to stimulate the CTL, thus localizing the epitope to amino acid residues 351-547. Additional fragments encoding amino acids 1-472 (Fragment A) and amino acids 1-351 (Fragment B) were also constructed. Fragment A but not Fragment B stimulated the CTL thus localizing the epitope to amino acid residues 351-472. Overlapping 20-mer and 18-mer peptides representing this region were tested by pulsing Jurkat/A2 Kb cells versus CTL in an IFN-gamma assay. Only peptides P501S-369(20) and P501S-369(18) stimulated the CTL. Nine-mer and 10-mer peptides representing this region were synthesized and similarly tested. Peptide P501S-370 (SEQ ID NO: 539) was the minimal 9-mer giving a strong response. Peptide P501S-376 (SEQ ID NO: 540) also gave a weak response, suggesting that it might represent a cross-reactive epitope.

[0907] In subsequent studies, the ability of primary human B cells transduced with P501S to prime MHC class I-restricted, P501S-specific, autologous CD8 T cells was examined. Primary B cells were derived from PBMC of a homozygous HLA-A2 donor by culture in CD40 ligand and IL-4, transduced at high frequency with recombinant P501S in the vector pBIB, and selected with blastocidin-S. For in vitro priming, purified CD8+ T cells were cultured with autologous CD40 ligand+IL-4 derived, P501S-transduced B cells in a 96-well microculture format. These CTL microcultures were re-stimulated with P501S-transduced B cells and then assayed for specificity. Following this initial screen, microcultures with significant signal above background were cloned on autologous EBV-transformed B cells (BLCL), also transduced with P501S. Using IFN-gamma ELISPOT for detection, several of these CD8 T cell clones were found to be specific for P501S, as demonstrated by reactivity to BLCL/P501S but not BLCL transduced with control antigen. It was further demonstrated that the anti-P501S CD8 T cell specificity is HLA-A2-restricted. First, antibody blocking experiments with anti-HLA-A,B,C monoclonal antibody (W6.32), anti-HLA-B,C monoclonal antibody (B1.23.2) and a control monoclonal antibody showed that only the anti-HLA-A,B,C antibody blocked recognition of P501S-expressing autologous BLCL. Secondly, the anti-P501S CTL also recognized an HLA-A2 matched, heterologous BLCL transduced with P501S, but not the corresponding EGFP transduced control BLCL.

### Example 13

### Identification of Prostate-Specific Antigens by Microarray Analysis

[0908] This Example describes the isolation of certain prostate-specific polypeptides from a prostate tumor cDNA library.

[0909] A human prostate tumor cDNA expression library as described above was screened using microarray analysis to identify clones that display at least a three fold over-expression in prostate tumor and/or normal prostate tissue, as compared to non-prostate normal tissues (not including testis). 372 clones were identified, and 319 were successfully sequenced. Table I presents a summary of these clones, which are shown in SEQ ID NOs:385-400. Of these sequences SEQ ID NOs:386, 389, 390 and 392 correspond to novel genes, and SEQ ID NOs: 393 and 396 correspond to previously identified sequences. The others (SEQ ID NOs:385, 387, 388, 391, 394, 395 and 397-400) correspond to known sequences, as shown in Table I.

TABLE I
Summary of Prostate Tumor Antigens

| Known Genes | Previously Identified Genes | Novel Genes |
|---|---|---|
| T-cell gamma chain | P504S | 23379 (SEQ ID NO: 389) |
| Kallikrein | P1000C | 23399 (SEQ ID NO: 392) |
| Vector | P501S | 23320 (SEQ ID NO: 386) |
| CGI-82 protein mRNA (23319; SEQ ID NO: 385) | P503S | 23381 (SEQ ID |
| | | NO: 390) |
| PSA | P510S | |
| Ald. 6 Dehyd. | P784P | |
| L-iditol-2 dehydrogenase (23376; SEQ ID NO: 388) | P502S | |
| Ets transcription factor PDEF (22672; SEQ ID | P706P | |
| NO: 398) | | |
| hTGR (22678; SEQ ID NO: 399) | 19142.2, bangur.seq (22621; | |
| | SEQ ID NO: 396) | |
| KIAA0295(22685; SEQ ID NO: 400) | 5566.1 Wang (23404; SEQ ID | |
| | NO: 393) | |
| Prostatic Acid Phosphatase(22655; SEQ ID | P712P | |
| NO: 397) | | |
| transglutaminase (22611; SEQ ID NO: 395) | P778P | |
| HDLBP (23508; SEQ ID NO: 394) | | |
| CGI-69 Protein(23367; SEQ ID NO: 387) | | |
| KIAA0122(23383; SEQ ID NO: 391) | | |
| TEEG | | |

[0910] CGI-82 showed 4.06 fold over-expression in prostate tissues as compared to other normal tissues tested. It was over-expressed in 43% of prostate tumors, 25% normal prostate, not detected in other normal tissues tested. L-iditol-2 dehydrogenase showed 4.94 fold over-expression in prostate tissues as compared to other normal tissues tested. It was over-expressed in 90% of prostate tumors, 100% of normal prostate, and not detected in other normal tissues tested. Ets transcription factor PDEF showed 5.55 fold over-expression in prostate tissues as compared to other normal tissues tested. It was over-expressed in 47% prostate tumors, 25% normal prostate and not detected in other normal tissues tested. hTGR1 showed 9.11 fold over-expression in prostate tissues as compared to other normal tissues tested. It was over-expressed in 63% of prostate tumors and is not detected in normal tissues tested including normal prostate. KIAA0295 showed 5.59 fold over-expression in prostate tissues as compared to other normal tissues tested. It was over-expressed in 47% of prostate tumors, low to undetectable in normal tissues tested including normal prostate tissues. Prostatic acid phosphatase showed 9.14 fold over-expression in prostate tissues as compared to other normal tissues tested. It was over-expressed in 67% of prostate tumors, 50% of normal prostate, and not detected in other normal tissues tested. Transglutaminase showed 14.84 fold over-expression in prostate tissues as compared to other normal tissues tested. It was over-expressed in 30% of prostate tumors, 50% of normal prostate, and is not detected in other normal tissues tested. High density lipoprotein binding protein (HDLBP) showed 28.06 fold over-expression in prostate tissues as compared to other normal tissues tested. It was over-expressed in 97% of prostate tumors, 75% of normal prostate, and is undetectable in all other normal tissues tested. CGI-69 showed 3.56 fold over-expression in prostate tissues as compared to other normal tissues tested. It is a low abundant gene, detected in more than 90% of prostate tumors, and in 75% normal prostate tissues. The expression of this gene in normal tissues was very low. KIAA0122 showed 4.24 fold over-expression in prostate tissues as compared to other normal tissues tested. It was over-expressed in 57% of prostate tumors, it was undetectable in all normal tissues tested including normal prostate tissues. 19142.2 bangur showed 23.25 fold over-expression in prostate tissues as compared to other normal tissues tested. It was over-expressed in 97% of prostate tumors and 100% of normal prostate. It was undetectable in other normal tissues tested. 5566.1 Wang showed 3.31 fold over-expression in prostate tissues as compared to other normal tissues tested. It was over-expressed in 97% of prostate tumors, 75% normal prostate and was also over-expressed in normal bone marrow, pancreas, and activated PBMC. Novel clone 23379 (also referred to as P553S) showed 4.86 fold over-expression in prostate tissues as compared to other normal tissues tested. It was detectable in 97% of prostate tumors and 75% normal prostate and is undetectable in all other normal tissues tested. Novel clone 23399 showed 4.09 fold over-expression in prostate tissues as compared to other normal tissues tested. It was over-expressed in 27% of prostate tumors and was undetectable in all normal tissues tested including normal prostate tissues. Novel clone 23320 showed 3.15 fold over-expression in prostate tissues as compared to other normal tissues tested. It was detectable in all prostate tumors and 50% of normal prostate tissues. It was also expressed in normal colon and trachea. Other normal tissues do not express this gene at high level.

[0911] Subsequent full-length cloning studies on P553S, using standard techniques, revealed that this clone is an incomplete spliced form of P501S. The determined cDNA sequences for four splice variants of P553S are provided in SEQ ID NO: 702-705. An amino acid sequence encoded by SEQ ID NO: 705 is provided in SEQ ID NO: 706. The cDNA sequence of SEQ ID NO: 702 was found to contain two open reading frames (ORFs). The amino acid sequences encoded by these two ORFs are provided in SEQ ID NO: 707 and 708.

### Example 14

### Identification of Prostate-Specific Antigens by Electronic Subtraction

[0912] This Example describes the use of an electronic subtraction technique to identify prostate-specific antigens.

[0913] Potential prostate-specific genes present in the GenBank human EST database were identified by electronic subtraction (similar to that described by Vasmatizis et al., Proc. Natl. Acad. Sci. USA 95:300-304, 1998). The sequences of EST clones (43,482) derived from various prostate libraries were obtained from the GenBank public human EST database. Each prostate EST sequence was used as a query sequence in a BLASTN (National Center for Biotechnology Information) search against the human EST database. All matches considered identical (length of matching sequence >100 base pairs, density of identical matches over this region >70%) were grouped (aligned) together in a cluster. Clusters containing more than 200 ESTs were discarded since they probably represented repetitive elements or highly expressed genes such as those for ribosomal proteins. If two or more clusters shared common ESTs, those clusters were grouped together into a “supercluster,” resulting in 4,345 prostate superclusters.

[0914] Records for the 479 human cDNA libraries represented in the GenBank release were downloaded to create a database of these cDNA library records. These 479 cDNA libraries were grouped into three groups: Plus (normal prostate and prostate tumor libraries, and breast cell line libraries, in which expression was desired), Minus (libraries from other normal adult tissues, in which expression was not desirable), and Other (libraries from fetal tissue, infant tissue, tissues found only in women, non-prostate tumors and cell lines other than prostate cell lines, in which expression was considered to be irrelevant). A summary of these library groups is presented in Table II.

TABLE II
Prostate cDNA Libraries and ESTs

| Library | # of Libraries | # of ESTs |
|---|---|---|
| Plus | 25 | 43,482 |
| Normal | 11 | 18,875 |
| Tumor | 11 | 21,769 |
| Cell lines | 3 | 2,838 |
| Minus | 166 | |
| Other | 287 | |

[0915] Each supercluster was analyzed in terms of the ESTs within the supercluster. The tissue source of each EST clone was noted and used to classify the superclusters into four groups: Type 1—EST clones found in the Plus group libraries only; no expression detected in Minus or Other group libraries; Type 2—EST clones derived from the Plus and Other group libraries only; no expression detected in the Minus group; Type 3—EST clones derived from the Plus, Minus and Other group libraries, but the number of ESTs derived from the Plus group is higher than in either the Minus or Other groups; and Type 4—EST clones derived from Plus, Minus and Other group libraries, but the number derived from the Plus group is higher than the number derived from the Minus group. This analysis identified 4,345 breast clusters (see Table III). From these clusters, 3,172 EST clones were ordered from Research Genetics, Inc., and were received as frozen glycerol stocks in 96-well plates.

TABLE III
Prostate Cluster Summary

| | # of | # of ESTs |
|---|---|---|
| Type | Superclusters | Ordered |
| 1 | 688 | 677 |
| 2 | 2899 | 2484 |
| 3 | 85 | 11 |
| 4 | 673 | 0 |
| Total | 4345 | 3172 |

[0916] The EST clone inserts were PCR-amplified using amino-linked PCR primers for Synteni microarray analysis. When more than one PCR product was obtained for a particular clone, that PCR product was not used for expression analysis. In total, 2,528 clones from the electronic subtraction method were analyzed by microarray analysis to identify electronic subtraction breast clones that had high levels of tumor vs. normal tissue mRNA. Such screens were performed using a Synteni (Palo Alto, Calif.) microarray, according to the manufacturer's instructions (and essentially as described by Schena et al., Proc. Natl. Acad. Sci. USA 93:10614-10619, 1996 and Heller et al., Proc. Natl. Acad. Sci. USA 94:2150-2155, 1997). Within these analyses, the clones were arrayed on the chip, which was then probed with fluorescent probes generated from normal and tumor prostate cDNA, as well as various other normal tissues. The slides were scanned and the fluorescence intensity was measured.

[0917] Clones with an expression ratio greater than 3 (i.e., the level in prostate tumor and normal prostate mRNA was at least three times the level in other normal tissue mRNA) were identified as prostate tumor-specific sequences (Table IV). The sequences of these clones are provided in SEQ ID NO: 401-453, with certain novel sequences shown in SEQ ID NO: 407, 413, 416-419, 422, 426, 427 and 450.

TABLE IV
Prostate-tumor Specific Clones

| | Sequence | |
|---|---|---|
| SEQ ID NO. | Designation | Comments |
| 401 | 22545 | previously identified P1000C |
| 402 | 22547 | previously identified P704P |
| 403 | 22548 | known |
| 404 | 22550 | known |
| 405 | 22551 | PSA |
| 406 | 22552 | prostate secretory protein 94 |
| 407 | 22553 | novel |
| 408 | 22558 | previously identified P509S |
| 409 | 22562 | glandular kallikrein |
| 410 | 22565 | previously identified P1000C |
| 411 | 22567 | PAP |
| 412 | 22568 | B1006C (breast tumor antigen) |
| 413 | 22570 | novel |
| 414 | 22571 | PSA |
| 415 | 22572 | previously identified P706P |
| 416 | 22573 | novel |
| 417 | 22574 | novel |
| 418 | 22575 | novel |
| 419 | 22580 | novel |
| 420 | 22581 | PAP |
| 421 | 22582 | prostatic secretory protein 94 |
| 422 | 22583 | novel |
| 423 | 22584 | prostatic secretory protein 94 |
| 424 | 22585 | prostatic secretory protein 94 |
| 425 | 22586 | known |
| 426 | 22587 | novel |
| 427 | 22588 | novel |
| 428 | 22589 | PAP |
| 429 | 22590 | known |
| 430 | 22591 | PSA |
| 431 | 22592 | known |
| 432 | 22593 | Previously identified P777P |
| 433 | 22594 | T cell receptor gamma chain |
| 434 | 22595 | Previously identified P705P |
| 435 | 22596 | Previously identified P707P |
| 436 | 22847 | PAP |
| 437 | 22848 | known |
| 438 | 22849 | prostatic secretory protein 57 |
| 439 | 22851 | PAP |
| 440 | 22852 | PAP |
| 441 | 22853 | PAP |
| 442 | 22854 | previously identified P509S |
| 443 | 22855 | previously identified P705P |
| 444 | 22856 | previously identified P774P |
| 445 | 22857 | PSA |
| 446 | 23601 | previously identified P777P |
| 447 | 23602 | PSA |
| 448 | 23605 | PSA |
| 449 | 23606 | PSA |
| 450 | 23612 | novel |
| 451 | 23614 | PSA |
| 452 | 23618 | previously identified P1000C |
| 453 | 23622 | previously identified P705P |

[0918] Further studies on the clone of SEQ ID NO: 407 (also referred to as P1020C) led to the isolation of an extended cDNA sequence provided in SEQ ID NO: 591. This extended cDNA sequence was found to contain an open reading frame that encodes the predicted amino acid sequence of SEQ ID NO: 592. The P1020C cDNA and amino acid sequences were found to show some similarity to the human endogenous retroviral HERV-K pol gene and protein.

### Example 15

### Further Identification of Prostate-Specific Antigens by Microarray Analysis

[0919] This Example describes the isolation of additional prostate-specific polypeptides from a prostate tumor cDNA library.

[0920] A human prostate tumor cDNA expression library as described above was screened using microarray analysis to identify clones that display at least a three fold over-expression in prostate tumor and/or normal prostate tissue, as compared to non-prostate normal tissue (not including testis). 142 clones were identified and sequenced. Certain of these clones are shown in SEQ ID NO: 454-467. Of these sequences, SEQ ID NO: 459-461 represent novel genes. The others (SEQ ID NO: 454-458 and 461-467) correspond to known sequences.

### Example 16

### Further Characterization of Prostate-Specific Antigen P710P

[0921] This Example describes the full length cloning of P710P.

[0922] The prostate cDNA library described above was screened with the P710P fragment described above. One million colonies were plated on LB/Ampicillin plates. Nylon membrane filters were used to lift these colonies, and the cDNAs picked up by these filters were then denatured and cross-linked to the filters by UV light. The P710P fragment was radiolabeled and used to hybridize with the filters. Positive cDNA clones were selected and their cDNAs recovered and sequenced by an automatic Perkin Elmer/Applied Biosystems Division Sequencer. Four sequences were obtained, and are presented in SEQ ID NO: 468-471. These sequences appear to represent different splice variants of the P710P gene. Subsequent comparison of the cDNA sequences of P710P with those in Genbank releaved homology to the DD3 gene (Genbank accession numbers AF103907 & AF103908). The cDNA sequence of DD3 is provided in SEQ ID NO: **.

### Example 17

### Protein Expression of the Prostate-Specific Antigen P501 s

[0923] This example describes the expression and purification of the prostate-specific antigen P501S in E. Coli, baculovirus and mammalian cells.

A) Expression in E. coli

[0924] Expression of the full-length form of P501S was attempted by first cloning P501S without the leader sequence (amino acids 36-553 of SEQ ID NO: 113) downstream of the first 30 amino acids of the M. tuberculosis antigen Ra12 (SEQ ID NO: 484) in pET17b. Specifically, P501S DNA was used to perform PCR using the primers AW025 (SEQ ID NO: 485) and AW003 (SEQ ID NO: 486). AW025 is a sense cloning primer that contains a HindIII site. AW003 is an antisense cloning primer that contains an EcoRI site. DNA amplification was performed using 5 μl 10×Pfu buffer, 1 μl 20 mM dNTPs, 1 μl each of the PCR primers at 10 μM concentration, 40 μl water, 1 μl Pfu DNA polymerase (Stratagene, La Jolla, Calif.) and 1 μl DNA at 100 ng/μl. Denaturation at 95° C. was performed for 30 sec, followed by 10 cycles of 95° C. for 30 sec, 60° C. for 1 min and by 72° C. for 3 min. 20 cycles of 95° C. for 30 sec, 65° C. for 1 min and by 72° C. for 3 min, and lastly by 1 cycle of 72° C. for 10 min. The PCR product was cloned to Ra12m/pET17b using HindIII and EcoRI. The sequence of the resulting fusion construct (referred to as Ra12-P501S-F) was confirmed by DNA sequencing.

[0925] The fusion construct was transformed into BL21(DE3)pLysE, pLysS and CodonPlus E. coli (Stratagene) and grown overnight in LB broth with kanamycin. The resulting culture was induced with IPTG. Protein was transferred to PVDF membrane and blocked with 5% non-fat milk (in PBS-Tween buffer), washed three times and incubated with mouse anti-His tag antibody (Clontech) for 1 hour. The membrane was washed 3 times and probed with HRP-Protein A (Zymed) for 30 min. Finally, the membrane was washed 3 times and developed with ECL (Amersham). No expression was detected by Western blot. Similarly, no expression was detected by Western blot when the Ra12-P501S-F fusion was used for expression in BL21 CodonPlus by CE6 phage (Invitrogen).

[0926] An N-terminal fragment of P501S (amino acids 36-325 of SEQ ID NO: 113) was cloned down-stream of the first 30 amino acids of the M. tuberculosis antigen Ra12 in pET 17b as follows. P501S DNA was used to perform PCR using the primers AW025 (SEQ ID NO: 485) and AW027 (SEQ ID NO: 487). AW027 is an antisense cloning primer that contains an EcoRI site and a stop codon. DNA amplification was performed essentially as described above. The resulting PCR product was cloned to Ra12 in pET17b at the HindIII and EcoRI sites. The fusion construct (referred to as Ra12-P501S-N) was confirmed by DNA sequencing.

[0927] The Ra12-P501S-N fusion construct was used for expression in BL21(DE3)pLysE, pLysS and CodonPlus, essentially as described above. Using Western blot analysis, protein bands were observed at the expected molecular weight of 36 kDa. Some high molecular weight bands were also observed, probably due to aggregation of the recombinant protein. No expression was detected by Western blot when the Ra12-P501S-F fusion was used for expression in BL21CodonPlus by CE6 phage.

[0928] A fusion construct comprising a C-terminal portion of P501S (amino acids 257-553 of SEQ ID NO: 113) located down-stream of the first 30 amino acids of the M. tuberculosis antigen Ra12 (SEQ ID NO: 484) was prepared as follows. P501S DNA was used to perform PCR using the primers AW026 (SEQ ID NO: 488) and AW003 (SEQ ID NO: 486). AW026 is a sense cloning primer that contains a HindIII site. DNA amplification was performed essentially as described above. The resulting PCR product was cloned to Ra12 in pET17b at the HindIII and EcoRI sites. The sequence for the fusion construct (referred to as Ral 2-PSOI S-C) was confirmed.

[0929] The Ra12-P501S-C fusion construct was used for expression in BL21(DE3)pLysE, pLysS and CodonPlus, as described above. A small amount of protein was detected by Western blot, with some molecular weight aggregates also being observed. Expression was also detected by Western blot when the Ra12-P501S-C fusion was used for expression in BL21 CodonPlus induced by CE6 phage.

B) Expression of P501S in Baculovirus

[0930] The Bac-to-Bac baculovirus expression system (BRL Life Technologies, Inc.) was used to express PSOIS protein in insect cells. Full-length P501S (SEQ ID NO: 113) was amplified by PCR and cloned into the XbaI site of the donor plasmid pFastBacl. The recombinant bacmid and baculovirus were prepared according to the manufacturer's instructions. The recombinant baculovirus was amplified in Sf9 cells and the high titer viral stocks were utilized to infect High Five cells (Invitrogen) to make the recombinant protein. The identity of the full-length protein was confirmed by N-terminal sequencing of the recombinant protein and by Western blot analysis (FIG. 7). Specifically, 0.6 million High Five cells in 6-well plates were infected with either the unrelated control virus BV/ECD_PD (lane 2), with recombinant baculovirus for P501S at different amounts or MOIs (lanes 4-8), or were uninfected (lane 3). Cell lysates were run on SDS-PAGE under reducing conditions and analyzed by Western blot with the anti-P501S monoclonal antibody P501S-10E3-G4D3 (prepared as described below). Lane 1 is the biotinylated protein molecular weight marker (BioLabs).

[0931] The localization of recombinant P501S in the insect cells was investigated as follows. The insect cells overexpressing P501S were fractionated into fractions of nucleus, mitochondria, membrane and cytosol. Equal amounts of protein from each fraction were analyzed by Western blot with a monoclonal antibody against P501S. Due to the scheme of fractionation, both nucleus and mitochondria fractions contain some plasma membrane components. However, the membrane fraction is basically free from mitochondria and nucleus. P501S was found to be present in all fractions that contain the membrane component, suggesting that P501S may be associated with plasma membrane of the insect cells expressing the recombinant protein.

C) Expression of P501S in Mammalian Cells

[0932] Full-length P501S (553AA) was cloned into various mammalian expression vectors, including pCEP4 (Invitrogen), pVR1012 (Vical, San Diego, Calif.) and a modified form of the retroviral vector pBMN, referred to as pBIB. Transfection of P501S/pCEP4 and P501S/pVR1012 into HEK293 fibroblasts was carried out using the Fugene transfection reagent (Boehringer Mannheim). Briefly, 2 ul of Fugene reagent was diluted into 100 ul of serum-free media and incubated at room temperature for 5-10 min. This mixture was added to 1 ug of P501S plasmid DNA, mixed briefly and incubated for 30 minutes at room temperature. The Fugene/DNA mixture was added to cells and incubated for 24-48 hours. Expression of recombinant P501S in transfected HEK293 fibroblasts was detected by means of Western blot employing a monoclonal antibody to P501S.

[0933] Transfection of p501S/pCEP4 into CHO-K cells (American Type Culture Collection, Rockville, Md.) was carried out using GenePorter transfection reagent (Gene Therapy Systems, San Diego, Calif.). Briefly, 15 μl of GenePorter was diluted in 500 μl of serum-free media and incubated at room temperature for 10 min. The GenePorter/media mixture was added to 2 μg of plasmid DNA that was diluted in 500 μl of serum-free media, mixed briefly and incubated for 30 min at room temperature. CHO-K cells were rinsed in PBS to remove serum proteins, and the GenePorter/DNA mix was added and incubated for 5 hours. The transfected cells were then fed an equal volume of 2× media and incubated for 24-48 hours.

[0934] FACS analysis of PSOIS transiently infected CHO-K cells, demonstrated surface expression of P501S. Expression was detected using rabbit polyclonal antisera raised against a P501S peptide, as described below. Flow cytometric analysis was performed using a FaCScan (Becton Dickinson), and the data were analyzed using the Cell Quest program.

### Example 18

### Preparation and Characterization of Antibodies Against Prostate-Specific Polypeptides

A) Preparation and Characterization of Polyclonal Antibodies Against P703P, P504S AND P509S

[0935] Polyclonal antibodies against P703P, P504S and P509S were prepared as follows.

[0936] Each prostate tumor antigen expressed in an E. coli recombinant expression system was grown overnight in LB broth with the appropriate antibiotics at 37° C. in a shaking incubator. The next morning, 10 ml of the overnight culture was added to 500 ml to 2×YT plus appropriate antibiotics in a 2L-baffled Erlenmeyer flask. When the Optical Density (at 560 nm) of the culture reached 0.4-0.6, the cells were induced with IPTG (1 mM). Four hours after induction with IPTG, the cells were harvested by centrifugation. The cells were then washed with phosphate buffered saline and centrifuged again. The supernatant was discarded and the cells were either frozen for future use or immediately processed. Twenty ml of lysis buffer was added to the cell pellets and vortexed. To break open the E. coli cells, this mixture was then run through the French Press at a pressure of 16,000 psi. The cells were then centrifuged again and the supernatant and pellet were checked by SDS-PAGE for the partitioning of the recombinant protein. For proteins that localized to the cell pellet, the pellet was resuspended in 10 mM Tris pH 8.0, 1% CHAPS and the inclusion body pellet was washed and centrifuged again. This procedure was repeated twice more. The washed inclusion body pellet was solubilized with either 8 M urea or 6 M guanidine HCl containing 10 mM Tris pH 8.0 plus 10 mM imidazole. The solubilized protein was added to 5 ml of nickel-chelate resin (Qiagen) and incubated for 45 min to 1 hour at room temperature with continuous agitation. After incubation, the resin and protein mixture were poured through a disposable column and the flow through was collected. The column was then washed with 10-20 column volumes of the solubilization buffer. The antigen was then eluted from the column using 8M urea, 10 mM Tris pH 8.0 and 300 mM imidazole and collected in 3 ml fractions. A SDS-PAGE gel was run to determine which fractions to pool for further purification.

[0937] As a final purification step, a strong anion exchange resin such as HiPrepQ (Biorad) was equilibrated with the appropriate buffer and the pooled fractions from above were loaded onto the column. Each antigen was eluted off the column with a increasing salt gradient. Fractions were collected as the column was run and another SDS-PAGE gel was run to determine which fractions from the column to pool. The pooled fractions were dialyzed against 10 mM Tris pH 8.0. The proteins were then vialed after filtration through a 0.22 micron filter and the antigens were frozen until needed for immunization.

[0938] Four hundred micrograms of each prostate antigen was combined with 100 micrograms of muramyldipeptide (MDP). Every four weeks rabbits were boosted with 100 micrograms mixed with an equal volume of Incomplete Freund's Adjuvant (IFA). Seven days following each boost, the animal was bled. Sera was generated by incubating the blood at 4° C. for 12-4 hours followed by centrifugation.

[0939] Ninety-six well plates were coated with antigen by incubating with 50 microliters (typically 1 microgram) of recombinant protein at 4° C. for 20 hours. 250 microliters of BSA blocking buffer was added to the wells and incubated at room temperature for 2 hours. Plates were washed 6 times with PBS/0.01% Tween. Rabbit sera was diluted in PBS. Fifty microliters of diluted sera was added to each well and incubated at room temperature for 30 min. Plates were washed as described above before 50 microliters of goat anti-rabbit horse radish peroxidase (HRP) at a 1:10000 dilution was added and incubated at room temperature for 30 min. Plates were again washed as described above and 100 microliters of TMB microwell peroxidase substrate was added to each well. Following a 15 min incubation in the dark at room temperature, the colorimetric reaction was stopped with 100 microliters of 1N H₂SO₄ and read immediately at 450 nm. All polyclonal antibodies showed immunoreactivity to the appropriate antigen.

B) Preparation and Characterization of Antibodies Against P501S

[0940] A murine monoclonal antibody directed against the carboxy-terminus of the prostate-specific antigen P501S was prepared as follows.

[0941] A truncated fragment of P501S (amino acids 355-526 of SEQ ID NO: 113) was generated and cloned into the pET28b vector (Novagen) and expressed in E. coli as a thioredoxin fusion protein with a histidine tag. The trx-P501S fusion protein was purified by nickel chromatography, digested with thrombin to remove the trx fragment and further purified by an acid precipitation procedure followed by reverse phase HPLC.

[0942] Mice were immunized with truncated P501S protein. Serum bleeds from mice that potentially contained anti-P501S polyclonal sera were tested for P501S-specific reactivity using ELISA assays with purified P501S and trx-P501S proteins. Serum bleeds that appeared to react specifically with P501S were then screened for P501S reactivity by Western analysis. Mice that contained a P501S-specific antibody component were sacrificed and spleen cells were used to generate anti-P501S antibody producing hybridomas using standard techniques. Hybridoma supernatants were tested for P501S-specific reactivity initially by ELISA, and subsequently by FACS analysis of reactivity with P501S transduced cells. Based on these results, a monoclonal hybridoma referred to as 10E3 was chosen for further subcloning. A number of subclones were generated, tested for specific reactivity to P501S using ELISA and typed for IgG isotype. The results of this analysis are shown below in Table V. Of the 16 subclones tested, the monoclonal antibody 10E3-G4-D3 was selected for further study.

TABLE V
Isotype analysis of murine anti-P501S monoclonal antibodies

| | | Estimated [Ig] in |
|---|---|---|
| Hybridoma clone | Isotype | supernatant (μg/ml) |
| 4D11 | IgG1 | 14.6 |
| 1G1 | IgG1 | 0.6 |
| 4F6 | IgG1 | 72 |
| 4H5 | IgG1 | 13.8 |
| 4H5-E12 | IgG1 | 10.7 |
| 4H5-EH2 | IgG1 | 9.2 |
| 4H5-H2-A10 | IgG1 | 10 |
| 4H5-H2-A3 | IgG1 | 12.8 |
| 4H5-H2-A10-G6 | IgG1 | 13.6 |
| 4H5-H2-B11 | IgG1 | 12.3 |
| 10E3 | IgG2a | 3.4 |
| 10E3-D4 | IgG2a | 3.8 |
| 10E3-D4-G3 | IgG2a | 9.5 |
| 10E3-D4-G6 | IgG2a | 10.4 |
| 10E3-E7 | IgG2a | 6.5 |
| 8H12 | IgG2a | 0.6 |

[0943] The specificity of 10E3-G4-D3 for P501S was examined by FACS analysis. Specifically, cells were fixed (2% formaldehyde, 10 minutes), permeabilized (0.1% saponin, 10 minutes) and stained with 10E3-G4-D3 at 0.5-1 μg/ml, followed by incubation with a secondary, FITC-conjugated goat anti-mouse Ig antibody (Pharmingen, San Diego, Calif.). Cells were then analyzed for FITC fluorescence using an Excalibur fluorescence activated cell sorter. For FACS analysis of transduced cells, B-LCL were retrovirally transduced with P501S. For analysis of infected cells, B-LCL were infected with a vaccinia vector that expresses P501S. To demonstrate specificity in these assays, B-LCL transduced with a different antigen (P703P) and uninfected B-LCL vectors were utilized. 10E3-G4-D3 was shown to bind with P501S-transduced B-LCL and also with P501S-infected B-LCL, but not with either uninfected cells or P703P-transduced cells.

[0944] To determine whether the epitope recognized by 10E3-G4-D3 was found on the surface or in an intracellular compartment of cells, B-LCL were transduced with P501S or HLA-B8 as a control antigen and either fixed and permeabilized as described above or directly stained with 10E3-G4-D3 and analyzed as above. Specific recognition of P501S by 10E3-G4-D3 was found to require permeabilization, suggesting that the epitope recognized by this antibody is intracellular.

[0945] The reactivity of 10E3-G4-D3 with the three prostate tumor cell lines Lncap, PC-3 and DU-145, which are known to express high, medium and very low levels of P501S, respectively, was examined by permeabilizing the cells and treating them as described above. Higher reactivity of 10E3-G4-D3 was seen with Lncap than with PC-3, which in turn showed higher reactivity that DU-145. These results are in agreement with the real time PCR and demonstrate that the antibody specifically recognizes P501S in these tumor cell lines and that the epitope recognized in prostate tumor cell lines is also intracellular.

[0946] Specificity of 10E3-G4-D3 for P501S was also demonstrated by Western blot analysis. Lysates from the prostate tumor cell lines Lncap, DU-145 and PC-3, from P501S-transiently transfected HEK293 cells, and from non-transfected HEK293 cells were generated. Western blot analysis of these lysates with 10E3-G4-D3 revealed a 46 kDa immunoreactive band in Lncap, PC-3 and P501S-transfected HEK cells, but not in DU-145 cells or non-transfected HEK293 cells. P501S mRNA expression is consistent with these results since semi-quantitative PCR analysis revealed that P501S mRNA is expressed in Lncap, to a lesser but detectable level in PC-3 and not at all in DU-145 cells. Bacterially expressed and purified recombinant P501S (referred to as P501SStr2) was recognized by 10E3-G4-D3 (24 kDa), as was full-length P501S that was transiently expressed in HEK293 cells using either the expression vector VR1012 or pCEP4. Although the predicted molecular weight of P501S is 60.5 kDa, both transfected and “native” P501S run at a slightly lower mobility due to its hydrophobic nature.

[0947] Immunohistochemical analysis was performed on prostate tumor and a panel of normal tissue sections (prostate, adrenal, breast, cervix, colon, duodenum, gall bladder, ileum, kidney, ovary, pancreas, parotid gland, skeletal muscle, spleen and testis). Tissue samples were fixed in formalin solution for 24 hours and embedded in paraffin before being sliced into 10 micron sections. Tissue sections were permeabilized and incubated with 10E3-G4-D3 antibody for 1 hr. HRP-labeled anti-mouse followed by incubation with DAB chromogen was used to visualize P501S immunoreactivity. P501S was found to be highly expressed in both normal prostate and prostate tumor tissue but was not detected in any of the other tissues tested.

[0948] To identify the epitope recognized by 10E3-G4-D3, an epitope mapping approach was pursued. A series of 13 overlapping 20-21 mers (5 amino acid overlap; SEQ ID NO: 489-501) was synthesized that spanned the fragment of P501S used to generate 10E3-G4-D3. Flat bottom 96 well microtiter plates were coated with either the peptides or the P501S fragment used to immunize mice, at 1 microgram/ml for 2 hours at 37° C. Wells were then aspirated and blocked with phosphate buffered saline containing 1% (w/v) BSA for 2 hours at room temperature, and subsequently washed in PBS containing 0.1% Tween 20 (PBST). Purified antibody 10E3-G4-D3 was added at 2 fold dilutions (1000 ng-16 ng) in PBST and incubated for 30 minutes at room temperature. This was followed by washing 6 times with PBST and subsequently incubating with HRP-conjugated donkey anti-mouse IgG (H+L)Affinipure F(ab′) fragment (Jackson Immunoresearch, West Grove, Pa.) at 1:20000 for 30 minutes. Plates were then washed and incubated for 15 minutes in tetramethyl benzidine. Reactions were stopped by the addition of 1N sulfuric acid and plates were read at 450 nm using an ELISA plate reader. As shown in FIG. 8, reactivity was seen with the peptide of SEQ ID NO: 496 (corresponding to amino acids 439-459 of P501S) and with the P501S fragment but not with the remaining peptides, demonstrating that the epitope recognized by 10E3-G4-D3 is localized to amino acids 439-459 of SEQ ID NO: 113.

[0949] In order to further evaluate the tissue specificity of P501S, multi-array immunohistochemical analysis was performed on approximately 4700 different human tissues encompassing all the major normal organs as well as neoplasias derived from these tissues. Sixty-five of these human tissue samples were of prostate origin. Tissue sections 0.6 mm in diameter were formalin-fixed and paraffin embedded. Samples were pretreated with HIER using 10 mM citrate buffer pH 6.0 and boiling for 10 min. Sections were stained with 10E3-G4-D3 and P501S immunoreactivity was visualized with HRP. All the 65 prostate tissues samples (5 normal, 55 untreated prostate tumors, 5 hormone refractory prostate tumors) were positive, showing distinct perinuclear staining. All other tissues examined were negative for P501S expression.

C) Prepapation and Characterization of Antibodies Against P503S

[0950] A fragment of P503S (amino acids 113-241 of SEQ ID NO: 114) was expressed and purified from bacteria essentially as described above for P501S and used to immunize both rabbits and mice. Mouse monoclonal antibodies were isolated using standard hybridoma technology as described above. Rabbit mono clonal antibodies were isolated using Selected Lymphocyte Antibody Method (SLAM) technology at Immgenics Pharmaceuticals (Vancouver, BC, Canada). Table VI, below, lists the monoclonal antibodies that were developed against P503S.

TABLE VI

| Antibody | Species |
|---|---|
| 20D4 | Rabbit |
| JA1 | Rabbit |
| 1A4 | Mouse |
| 1C3 | Mouse |
| 1C9 | Mouse |
| 1D12 | Mouse |
| 2A11 | Mouse |
| 2H9 | Mouse |
| 4H7 | Mouse |
| 8A8 | Mouse |
| 8D10 | Mouse |
| 9C12 | Mouse |
| 6D12 | Mouse |

[0951] The DNA sequences encoding the complementarity determining regions (CDRs) for the rabbit monoclonal antibodies 20D4 and JA1 were determined and are provided in SEQ ID NO: 502 and 503, respectively.

[0952] In order to better define the epitope binding region of each of the antibodies, a series of overlapping peptides were generated that span amino acids 109-213 of SEQ ID NO: 114. These peptides were used to epitope map the anti-P503S monoclonal antibodies by ELISA as follows. The recombinant fragment of P503S that was employed as the immunogen was used as a positive control. Ninety-six well microtiter plates were coated with either peptide or recombinant antigen at 20 ng/well overnight at 4° C. Plates were aspirated and blocked with phosphate buffered saline containing 1% (w/v) BSA for 2 hours at room temperature then washed in PBS containing 0.1% Tween 20 (PBST). Purified rabbit monoclonal antibodies diluted in PBST were added to the wells and incubated for 30 min at room temperature. This was followed by washing 6 times with PBST and incubation with Protein-A HRP conjugate at a 1:2000 dilution for a further 30 min. Plates were washed six times in PBST and incubated with tetramethylbenzidine (TMB) substrate for a further 15 min. The reaction was stopped by the addition of 1N sulfuric acid and plates were read at 450 nm using at ELISA plate reader. ELISA with the mouse monoclonal antibodies was performed with supernatants from tissue culture run neat in the assay.

[0953] All of the antibodies bound to the recombinant P503S fragment, with the exception of the negative control SP2 supernatant. 20D4, JA1 and 1D12 bound strictly to peptide #2101 (SEQ ID NO: 504), which corresponds to amino acids 151-169 of SEQ ID NO: 114. IC3 bound to peptide #2102 (SEQ ID NO: 505), which corresponds to amino acids 165-184 of SEQ ID NO: 114. 9C12 bound to peptide #2099 (SEQ ID NO: 522), which corresponds to amino acids 120-139 of SEQ ID NO: 114. The other antibodies bind to regions that were not examined in these studies.

[0954] Subsequent to epitope mapping, the antibodies were tested by FACS analysis on a cell line that stably expressed P503S to confirm that the antibodies bind to cell surface epitopes. Cells stably transfected with a control plasmid were employed as a negative control. Cells were stained live with no fixative. 0.5 ug of anti-P503S monoclonal antibody was added and cells were incubated on ice for 30 min before being washed twice and incubated with a FITC-labelled goat anti-rabbit or mouse secondary antibody for 20 min. After being washed twice, cells were analyzed with an Excalibur fluorescent activated cell sorter. The monoclonal antibodies 1C3, 1D12, 9C12, 20D4 and JA1, but not 8D3, were found to bind to a cell surface epitope of P503S.

[0955] In order to determine which tissues express P503S, immunohistochemical analysis was performed, essentially as described above, on a panel of normal tissues (prostate, adrenal, breast, cervix, colon, duodenum, gall bladder, ileum, kidney, ovary, pancreas, parotid gland, skeletal muscle, spleen and testis). HRP-labeled anti-mouse or anti-rabbit antibody followed by incubation with TMB was used to visualize P503S immunoreactivity. P503S was found to be highly expressed in prostate tissue, with lower levels of expression being observed in cervix, colon, ileum and kidney, and no expression being observed in adrenal, breast, duodenum, gall bladder, ovary, pancreas, parotid gland, skeletal muscle, spleen and testis.

[0956] Western blot analysis was used to characterize anti-P503S monoclonal antibody specificity. SDS-PAGE was performed on recombinant (rec) P503S expressed in and purified from bacteria and on lysates from HEK293 cells transfected with full length P503S. Protein was transferred to nitrocellulose and then Western blotted with each of the anti-P503S monoclonal antibodies (20D4, JA1, 1D12, 6D12 and 9C12) at an antibody concentration of 1 ug/ml. Protein was detected using horse radish peroxidase (HRP) conjugated to either a goat anti-mouse monoclonal antibody or to protein A-sepharose. The monoclonal antibody 20D4 detected the appropriate molecular weight 14 kDa recombinant P503S (amino acids 113-241) and the 23.5 kDa species in the HEK293 cell lysates transfected with full length P503S. Other anti-P503S monoclonal antibodies displayed similar specificity by Western blot.

D) Preparation and Characterization of Antibodies Against P703P

[0957] Rabbits were immunized with either a truncated (P703Ptrl; SEQ ID NO: 172) or full-length mature form (P703Pfl; SEQ ID NO: 523) of recombinant P703P protein was expressed in and purified from bacteria as described above. Affinity purified polyclonal antibody was generated using immunogen P703Pfl or P703Ptrl attached to a solid support. Rabbit monoclonal antibodies were isolated using SLAM technology at Immgenics Pharmaceuticals. Table VII below lists both the polyclonal and monoclonal antibodies that were generated against P703P.

TABLE VII

| Antibody | Immunogen | Species/type |
|---|---|---|
| Aff. Purif. P703P (truncated); #2594 | P703Ptrl | Rabbit polyclonal |
| Aff. Purif. P703P (full length); #9245 | P703Pfl | Rabbit polyclonal |
| 2D4 | P703Ptrl | Rabbit monoclonal |
| 8H2 | P703Ptrl | Rabbit monoclonal |
| 7H8 | P703Ptrl | Rabbit monoclonal |

[0958] The DNA sequences encoding the complementarity determining regions (CDRs) for the rabbit monoclonal antibodies 8H2, 7H8 and 2D4 were determined and are provided in SEQ ID NO: 506-508, respectively.

[0959] Epitope mapping studies were performed as described above. Monoclonal antibodies 2D4 and 7H8 were found to specifically bind to the peptides of SEQ ID NO: 509 (corresponding to amino acids 145-159 of SEQ ID NO: 172) and SEQ ID NO: 510 (corresponding to amino acids 1I-25 of SEQ ID NO: 172), respectively. The polyclonal antibody 2594 was found to bind to the peptides of SEQ ID NO: 511-514, with the polyclonal antibody 9427 binding to the peptides of SEQ ID NO: 515-517.

[0960] The specificity of the anti-P703P antibodies was determined by Western blot analysis as follows. SDS-PAGE was performed on (1) bacterially expressed recombinant antigen; (2) lysates of HEK293 cells and Ltk−/− cells either untransfected or transfected with a plasmid expressing full length P703P; and (3) supernatant isolated from these cell cultures. Protein was transferred to nitrocellulose and then Western blotted using the anti-P703P polyclonal antibody #2594 at an antibody concentration of 1 ug/ml. Protein was detected using horse radish peroxidase (HRP) conjugated to an anti-rabbit antibody. A 35 kDa immunoreactive band could be observed with recombinant P703P. Recombinant P703P runs at a slightly higher molecular weight since it is epitope tagged. In lysates and supernatants from cells transfected with full length P703P, a 30 kDa band corresponding to P703P was observed. To assure specificity, lysates from HEK293 cells stably transfected with a control plasmid were also tested and were negative for P703P expression. Other anti-P703P antibodies showed similar results.

[0961] Immunohistochemical studies were performed as described above, using anti-P703P monoclonal antibody. P703P was found to be expressed at high levels in normal prostate and prostate tumor tissue but was not detectable in all other tissues tested (breast tumor, lung tumor and normal kidney).

### Example 19

### Characterization of Cell Surface Expression and Chromosome Localization of the Prostate-Specific Antigen P501S

[0962] This example describes studies demonstrating that the prostate-specific antigen P501S is expressed on the surface of cells, together with studies to determine the probable chromosomal location of P501S.

[0963] The protein P501S (SEQ ID NO: 113) is predicted to have 11 transmembrane domains. Based on the discovery that the epitope recognized by the anti-P501S monoclonal antibody 10E3-G4-D3 (described above in Example 17) is intracellular, it was predicted that following transmembrane determinants would allow the prediction of extracellular domains of P501S. FIG. 9 is a schematic representation of the P501S protein showing the predicted location of the transmembrane domains and the intracellular epitope described in Example 17. Underlined sequence represents the predicted transmembrane domains, bold sequence represents the predicted extracellular domains, and italicized sequence represents the predicted intracellular domains. Sequence that is both bold and underlined represents sequence employed to generate polyclonal rabbit serum. The location of the transmembrane domains was predicted using HHMTOP as described by Tusnady and Simon (Principles Governing Amino Acid Composition of Integral Membrane Proteins: Applications to Topology Prediction, J. Mol. Biol. 283:489-506, 1998).

[0964] Based on FIG. 9, the P501S domain flanked by the transmembrane domains corresponding to amino acids 274-295 and 323-342 is predicted to be extracellular. The peptide of SEQ ID NO: 518 corresponds to amino acids 306-320 of P501S and lies in the predicted extracellular domain. The peptide of SEQ ID NO: 519, which is identical to the peptide of SEQ ID NO: 518 with the exception of the substitution of the histidine with an asparginine, was synthesized as described above. A Cys-Gly was added to the C-terminus of the peptide to facilitate conjugation to the carrier protein. Cleavage of the peptide from the solid support was carried out using the following cleavage mixture: trifluoroacetic acid:ethanediol:thioanisol:water:phenol (40:1:2:2:3). After cleaving for two hours, the peptide was precipitated in cold ether. The peptide pellet was then dissolved in 10% v/v acetic acid and lyophilized prior to purification by C18 reverse phase hplc. A gradient of 5-60% acetonitrile (containing 0.05% TFA) in water (containing 0.05% TFA) was used to elute the peptide. The purity of the peptide was verified by hplc and mass spectrometry, and was determined to be >95%. The purified peptide was used to generate rabbit polyclonal antisera as described above.

[0965] Surface expression of P501S was examined by FACS analysis. Cells were stained with the polyclonal anti-P501S peptide serum at 10 μg/ml, washed, incubated with a secondary FITC-conjugated goat anti-rabbit Ig antibody (ICN), washed and analyzed for FITC fluorescence using an Excalibur fluorescence activated cell sorter. For FACS analysis of transduced cells, B-LCL were retrovirally transduced with P501S. To demonstrate specificity in these assays, B-LCL transduced with an irrelevant antigen (P703P) or nontransduced were stained in parallel. For FACS analysis of prostate tumor cell lines, Lncap, PC-3 and DU-145 were utilized. Prostate tumor cell lines were dissociated from tissue culture plates using cell dissociation medium and stained as above. All samples were treated with propidium iodide (PI) prior to FACS analysis, and data was obtained from PI-excluding (i.e., intact and non-permeabilized) cells. The rabbit polyclonal serum generated against the peptide of SEQ ID NO: 519 was shown to specifically recognize the surface of cells transduced to express P501S, demonstrating that the epitope recognized by the polyclonal serum is extracellular.

[0966] To determine biochemically if P501S is expressed on the cell surface, peripheral membranes from Lncap cells were isolated and subjected to Western blot analysis. Specifically, Lncap cells were lysed using a dounce homogenizer in 5 ml of homogenization buffer (250 mM sucrose, 10 mM HEPES, 1 mM EDTA, pH 8.0, 1 complete protease inhibitor tablet (Boehringer Mannheim)). Lysate samples were spun at 1000 g for 5 min at 4° C. The supernatant was then spun at 8000 g for 10 min at 4° C. Supernatant from the 8000 g spin was recovered and subjected to a 100,000 g spin for 30 min at 4° C. to recover peripheral membrane. Samples were then separated by SDS-PAGE and Western blotted with the mouse monoclonal antibody 10E3-G4-D3 (described above in Example 17) using conditions described above. Recombinant purified P501S, as well as HEK293 cells transfected with and over-expressing P501S were included as positive controls for P501S detection. LCL cell lysate was included as a negative control. P501S could be detected in Lncap total cell lysate, the 8000 g (internal membrane) fraction and also in the 100,000 g (plasma membrane) fraction. These results indicate that P501S is expressed at, and localizes to, the peripheral membrane.

[0967] To demonstrate that the rabbit polyclonal antiserum generated to the peptide of SEQ ID NO: 519 specifically recognizes this peptide as well as the corresponding native peptide of SEQ ID NO: 518, ELISA analyses were performed. For these analyses, flat-bottomed 96 well microtiter plates were coated with either the peptide of SEQ ID NO: 519, the longer peptide of SEQ ID NO: 520 that spans the entire predicted extracellular domain, the peptide of SEQ ID NO: 521 which represents the epitope recognized by the P501S-specific antibody 10E3-G4-D3, or a P501S fragment (corresponding to amino acids 355-526 of SEQ ID NO: 113) that does not include the immunizing peptide sequence, at 1 μg/ml for 2 hours at 37° C. Wells were aspirated, blocked with phosphate buffered saline containing 1% (w/v) BSA for 2 hours at room temperature and subsequently washed in PBS containing 0.1% Tween 20 (PBST). Purified anti-P501S polyclonal rabbit serum was added at 2 fold dilutions (1000 ng-125 ng) in PBST and incubated for 30 min at room temperature. This was followed by washing 6 times with PBST and incubating with HRP-conjugated goat anti-rabbit IgG (H+L) Affinipure F(ab′) fragment at 1:20000 for 30 min. Plates were then washed and incubated for 15 min in tetramethyl benzidine. Reactions were stopped by the addition of 1N sulfuric acid and plates were read at 450 nm using an ELISA plate reader. As shown in FIG. 11, the anti-P501S polyclonal rabbit serum specifically recognized the peptide of SEQ ID NO: 519 used in the immunization as well as the longer peptide of SEQ ID NO: 520, but did not recognize the irrelevant P501S-derived peptides and fragments.

[0968] In further studies, rabbits were immunized with peptides derived from the P501S sequence and predicted to be either extracellular or intracellular, as shown in FIG. 9. Polyclonal rabbit sera were isolated and polyclonal antibodies in the serum were purified, as described above. To determine specific reactivity with P501S, FACS analysis was employed, utilizing either B-LCL transduced with P501S or the irrelevant antigen P703P, of B-LCL infected with vaccinia virus-expressing P501S. For surface expression, dead and non-intact cells were excluded from the analysis as described above. For intracellular staining, cells were fixed and permeabilized as described above. Rabbit polyclonal serum generated against the peptide of SEQ ID NO: 548, which corresponds to amino acids 181-198 of P501S, was found to recognize a surface epitope of P501S. Rabbit polyclonal serum generated against the peptide SEQ ID NO: 551, which corresponds to amino acids 543-553 of P501S, was found to recognize an epitope that was either potentially extracellular or intracellular since in different experiments intact or permeabilized cells were recognized by the polyclonal sera. Based on similar deductive reasoning, the sequences of SEQ ID NO: 541-547, 549 and 550, which correspond to amino acids 109-122, 539-553, 509-520, 37-54, 342-359, 295-323, 217-274, 143-160 and 75-88, respectively, of P501S, can be considered to be potential surface epitopes of P501S recognized by antibodies.

[0969] The chromosomal location of P501S was determined using the GeneBridge 4 Radiation Hybrid panel (Research Genetics). The PCR primers of SEQ ID NO: 528 and 529 were employed in PCR with DNA pools from the hybrid panel according to the manufacturer's directions. After 38 cycles of amplification, the reaction products were separated on a 1.2% agarose gel, and the results were analyzed through the Whitehead Institute/MIT Center for Genome Research web server (http://www-genome.wi.mit.edu/cgi-bin/contig/rhmapper.pl) to determine the probable chromosomal location. Using this approach, P501S was mapped to the long arm of chromosome 1 at W1-9641 between q32 and q42. This region of chromosome 1 has been linked to prostate cancer susceptibility in hereditary prostate cancer (Smith et al. Science 274:1371-1374, 1996 and Berthon et al. Am. J. Hum. Genet. 62:1416-1424, 1998). These results suggest that P501S may play a role in prostate cancer malignancy.

### Example 20

### Preparation of Fusion Proteins of Prostate-Specific Antigens

[0970] The example describes the preparation of a fusion protein of the prostate-specific antigen P703P and a truncated form of the known prostate antigen PSA. The truncated form of PSA has a 21 amino acid deletion around the active serine site. The expression construct for the fusion protein also has a restriction site at 3′ end, immediately prior to the termination codon, to aid in adding cDNA for additional antigens.

[0971] The full-length cDNA for PSA was obtained by RT-PCR from a pool of RNA from human prostate tumor tissues using the primers of SEQ ID NO: 607 and 608, and cloned in the vector pCR-Blunt I-TOPO. The resulting cDNA was employed as a template to make two different fragments of PSA by PCR with two sets of primers (SEQ ID NO: 609 and 610; and SEQ ID NO: 611 and 612). The PCR products having the expected size were used as templates to make truncated forms of PSA by PCR with the primers of SEQ ID NO: 611 and 613, which generated PSA (delta 208-218 in amino acids). The cDNA for the mature form of P703P with a 6× histidine tag at the 5′ end, was prepared by PCR with P703P and the primers of SEQ ID NO: 614 and 615. The cDNA for the fusion of P703P with the truncated form of PSA (referred to as FOPP) was then obtained by PCR using the modified P703P cDNA and the truncated form of PSA cDNA as templates and the primers of SEQ ID NO: 614 and 615. The FOPP cDNA was cloned into the NdeI site and XhoI site of the expression vector pCRXI, and confirmed by DNA sequencing. The determined cDNA sequence for the fusion construct FOPP is provided in SEQ ID NO: 616, with the amino acid sequence being provided in SEQ ID NO: 617.

### Example 21

### Real-Time PCR Characterization of the Prostate-Specific Antigen P501S in Peripheral Blood of Prostate Cancer Patients

[0972] Circulating epithelial cells were isolated from fresh blood of normal individuals and metastatic prostate cancer patients, mRNA isolated and cDNA prepared using real-time PCR procedures. Real-time PCR was performed with the Taqman™ procedure using both gene specific primers and probes to determine the levels of gene expression.

[0973] Epithelial cells were enriched from blood samples using an immunomagnetic bead separation method (Dynal A. S., Oslo, Norway). Isolated cells were lysed and the magnetic beads removed. The lysate was then processed for poly A+ mRNA isolation using magnetic beads coated with Oligo(dT)25. After washing the beads in buffer, bead/poly A+ RNA samples were suspended in 10 mM Tris HCl pH 8.0 and subjected to reversed transcription. The resulting cDNA was subjected to real-time PCR using gene specific primers. Beta-actin content was also determined and used for normalization. Samples with P501S copies greater than the mean of the normal samples +3 standard deviations were considered positive. Real time PCR on blood samples was performed using the Taqman™ procedure but extending to 50 cycles using forward and reverse primers and probes specific for P501S. Of the eight samples tested, 6 were positive for PSOIS and β-actin signal. The remaining 2 samples had no detectable β-actin or P501S. No P501S signal was observed in the four normal blood samples tested.

[0974] From the foregoing, it will be appreciated that, although specific embodiments of the invention have been described herein for the purposes of illustration, various modifications may be made without deviating from the spirit and scope of the invention. Accordingly, the present invention is not limited except as by the appended claims.

The application's sequence listing, which the Patent Office published only in electronic form, follows.

SEQUENCE LISTING (701 sequences)

SEQ ID NO: 1 - DNA, 814 bp, Homo sapien
  misc_feature (1)...(814): n = A,T,C or G
tttttttttttttttcacagtataacagctctttatttctgtgagttctactaggaaatcatcaaatctgagggttgtctggaggacttcaatacacctccccccatagtgaatcagcttccagggggtccagtccctctccttacttcatccccatcccatgccaaaggaagaccctccctccttggctcacagccttctctaggcttcccagtgcctccaggacagagtgggttatgttttcagctccatccttgctgtgagtgtctggtgcgttgtgcctccagcttctgctcagtgcttcatggacagtgtccagcacatgtcactctccactctctcagtgtggatccactagttctagagcggccgccaccgcggtggagctccagcttttgttccctttagtgagggttaattgcgcgcttggcgtaatcatggtcataactgtttcctgtgtgaaattgttatccgctcacaattccacacaacatacgagccggaagcataaagtgtaaagcctggggtgcctaatgagtganctaactcacattaattgcgttgcgctcactgnccgctttccagtcnggaaaactgtcgtgccagctgcattaatgaatcggccaacgcncggggaaaagcggtttgcgttttgggggctcttccgcttctcgctcactnantcctgcgctcggtcnttcggctgcggggaacggtatcactcctcaaaggnggtattacggttatccnnaaatcnggggatacccnggaaaaaantttaacaaaagggcancaaagggcngaaacgtaaaaa

SEQ ID NO: 2 - DNA, 816 bp, Homo sapien
  misc_feature (1)...(816): n = A,T,C or G
acagaaatgttggatggtggagcacctttctatacgacttacaggacagcagatggggaattcatggctgttggagcaatagaaccccagttctacgagctgctgatcaaaggacttggactaaagtctgatgaacttcccaatcagatgagcatggatgattggccagaaatgaagaagaagtttgcagatgtatttgcaaagaagacgaaggcagagtggtgtcaaatctttgacggcacagatgcctgtgtgactccggttctgacttttgaggaggttgttcatcatgatcacaacaaggaacggggctcgtttatcaccagtgaggagcaggacgtgagcccccgccctgcacctctgctgttaaacaccccagccatcccttctttcaaaagggatccactagttctagaagcggccgccaccgcggtggagctccagcttttgttccctttagtgagggttaattgcgcgcttggcgtaatcatggtcatagctgtttcctgtgtgaaattgttatccgctcacaattcccccaacatacgagccggaacataaagtgttaagcctggggtgcctaatgantgagctaactcncattaattgcgttgcgctcactgcccgctttccagtcgggaaaactgtcgtgccactgcnttantgaatcngccaccccccgggaaaaggcggttgcnttttgggcctcttccgctttcctcgctcattgatcctngcncccggtcttcggctgcggngaacggttcactcctcaaaggcggtntnccggttatccccaaacnggggatacccnga

SEQ ID NO: 3 - DNA, 773 bp, Homo sapien
  misc_feature (1)...(773): n = A,T,C or G
cttttgaaagaagggatggctggggtgtttaacagcagaggtgcagggcgggggctcacgtcctgctcctcactggtgataaacgagccccgttccttgttgtgatcatgatgaacaacctcctcaaaagtcagaaccggagtcacacaggcatctgtgccgtcaaagatttgacaccactctgccttcgtcttctttgcaaatacatctgcaaacttcttcttcatttctggccaatcatccatgctcatctgattgggaagttcatcagactttagtccanntcctttgatcagcagctcgtagaactggggttctattgctccaacagccatgaattccccatctgctgtcctgtaagtcgtatagaaaggtgctccaccatccaacatgttctgtcctcgagggggggcccggtacccaattcgccctatantgagtcgtattacgcgcgctcactggccgtcgttttacaacgtcgtgactgggaaaaccctgggcgttaccaacttaatcgccttgcagcacatccccctttcgccagctgggcgtaatancgaaaaggcccgcaccgatcgcccttccaacagttgcgcacctgaatgggnaaatgggacccccctgttaccgcgcattnaacccccgcngggtttngttgttacccccacntnnaccgcttacactttgccagcgccttancgcccgctccctttcncctttcttcccttcctttcncnccnctttcccccggggtttcccccntcaaaccccna

SEQ ID NO: 4 - DNA, 828 bp, Homo sapien
  misc_feature (1)...(828): n = A,T,C or G
cctcctgagtcctactgacctgtgctttctggtgtggagtccagggctgctaggaaaaggaatgggcagacacaggtgtatgccaatgtttctgaaatgggtataatttcgtcctctccttcggaacactggctgtctctgaagacttctcgctcagtttcagtgaggacacacacaaagacgtgggtgaccatgttgtttgtggggtgcagagatgggaggggtggggcccaccctggaagagtggacagtgacacaaggtggacactctctacagatcactgaggataagctggagccacaatgcatgaggcacacacacagcaaggatgacnctgtaaacatagcccacgctgtcctgngggcactgggaagcctanatnaggccgtgagcanaaagaaggggaggatccactagttctanagcggccgccaccgcggtgganctccancttttgttccctttagtgagggttaattgcgcgcttggcntaatcatggtcatanctntttcctgtgtgaaattgttatccgctcacaattccacacaacatacganccggaaacataaantgtaaacctggggtgcctaatgantgactaactcacattaattgcgttgcgctcactgcccgctttccaatcnggaaacctgtcttgccncttgcattnatgaatcngccaacccccggggaaaagcgtttgcgttttgggcgctcttccgcttcctcnctcanttantccctncnctcggtcattccggctgcngcaaaccggttcaccncctccaaagggggtattccggtttccccnaatccgggganancc

SEQ ID NO: 5 - DNA, 834 bp, Homo sapien
  misc_feature (1)...(834): n = A,T,C or G
tttttttttttttttactgatagatggaatttattaagcttttcacatgtgatagcacatagttttaattgcatccaaagtactaacaaaaactctagcaatcaagaatggcagcatgttattttataacaatcaacacctgtggcttttaaaatttggttttcataagataatttatactgaagtaaatctagccatgcttttaaaaaatgctttaggtcactccaagcttggcagttaacatttggcataaacaataataaaacaatcacaatttaataaataacaaatacaacattgtaggccataatcatatacagtataaggaaaaggtggtagtgttgagtaagcagttattagaatagaataccttggcctctatgcaaatatgtctagacactttgattcactcagccctgacattcagttttcaaagtaggagacaggttctacagtatcattttacagtttccaacacattgaaaacaagtagaaaatgatgagttgatttttattaatgcattacatcctcaagagttatcaccaacccctcagttataaaaaattttcaagttatattagtcatataacttggtgtgcttattttaaattagtgctaaatggattaagtgaagacaacaatggtcccctaatgtgattgatattggtcatttttaccagcttctaaatctnaactttcaggcttttgaactggaacattgnatnacagtgttccanagttncaacctactggaacattacagtgtgcttgattcaaaatgttattttgttaaaaattaaattttaacctggtggaaaaataatttgaaatna

SEQ ID NO: 6 - DNA, 818 bp, Homo sapien
  misc_feature (1)...(818): n = A,T,C or G
ttttttttttttttttttttaagaccctcatcaatagatggagacatacagaaatagtcaaaccacatctacaaaatgccagtatcaggcggcggcttcgaagccaaagtgatgtttggatgtaaagtgaaatattagttggcggatgaagcagatagtgaggaaagttgagccaataatgacgtgaagtccgtggaagcctgtggctacaaaaaatgttgagccgtagatgccgtcggaaatggtgaagggagactcgaagtactctgaggcttgtaggagggtaaaatagagacccagtaaaattgtaataagcagtgcttgaattatttggtttcggttgttttctattagactatggtgagctcaggtgattgatactcctgatgcgagtaatacggatgtgtttaggagtgggacttctaggggatttagcggggtgatgcctgttgggggccagtgccctcctagttggggggtaggggctaggctggagtggtaaaaggctcagaaaaatcctgcgaagaaaaaaacttctgaggtaataaataggattatcccgtatcgaaggcctttttggacaggtggtgtgtggtggccttggtatgtgctttctcgtgttacatcgcgccatcattggtatatggttagtgtgttgggttantanggcctantatgaagaacttttggantggaattaaatcaatngcttggccggaagtcattanganggctnaaaaggccctgttangggtctgggctnggttttacccnacccatggaatncnccccccggacnantgnatccctattcttaa

SEQ ID NO: 7 - DNA, 817 bp, Homo sapien
  misc_feature (1)...(817): n = A,T,C or G
tttttttttttttttttttttggctctagagggggtagagggggtgctatagggtaaatacgggccctatttcaaagatttttaggggaattaattctaggacgatgggtatgaaactgtggtttgctccacagatttcagagcattgaccgtagtatacccccggtcgtgtagcggtgaaagtggtttggtttagacgtccgggaattgcatctgtttttaagcctaatgtggggacagctcatgagtgcaagacgtcttgtgatgtaattattatacnaatgggggcttcaatcgggagtactactcgattgtcaacgtcaaggagtcgcaggtcgcctggttctaggaataatgggggaagtatgtaggaattgaagattaatccgccgtagtcggtgttctcctaggttcaataccattggtggccaattgatttgatggtaaggggagggatcgttgaactcgtctgttatgtaaaggatnccttngggatgggaaggcnatnaaggactanggatnaatggcgggcangatatttcaaacngtctctanttcctgaaacgtctgaaatgttaataanaattaantttngttattgaatnttnnggaaaagggcttacaggactagaaaccaaatangaaaantaatnntaanggcnttatcntnaaaggtnataaccnctcctatnatcccacccaatngnattccccacncnnacnattggatnccccanttccanaaanggccnccccccggtgnannccnccttttgttcccttnantganggttattcncccctngcnttatcancc

SEQ ID NO: 8 - DNA, 799 bp, Homo sapien
  misc_feature (1)...(799): n = A,T,C or G
catttccgggtttactttctaaggaaagccgagcggaagctgctaacgtgggaatcggtgcataaggagaactttctgctggcacgcgctagggacaagcgggagagcgactccgagcgtctgaagcgcacgtcccagaaggtggacttggcactgaaacagctgggacacatccgcgagtacgaacagcgcctgaaagtgctggagcgggaggtccagcagtgtagccgcgtcctggggtgggtggccgangcctganccgctctgccttgctgcccccangtgggccgccaccccctgacctgcctgggtccaaacactgagccctgctggcggacttcaagganaacccccacanggggattttgctcctanantaaggctcatctgggcctcggcccccccacctggttggccttgtctttgangtgagccccatgtccatctgggccactgtcnggaccacctttngggagtgttctccttacaaccacannatgcccggctcctcccggaaaccantcccancctgngaaggatcaagncctgnatccactnntnctanaaccggccnccnccgcngtggaacccnccttntgttccttttcnttnagggttaatnncgccttggccttnccanngtcctncncnttttccnntgttnaaattgttangcncccnccnntcccncnncnncnancccgacccnnannttnnannncctgggggtnccnncngattgacccnnccnccctntanttgcnttngggnncnntgcccctttccctctnggganncg

SEQ ID NO: 9 - DNA, 801 bp, Homo sapien
  misc_feature (1)...(801): n = A,T,C or G
acgccttgatcctcccaggctgggactggttctgggaggagccgggcatgctgtggtttgtaangatgacactcccaaaggtggtcctgacagtggcccagatggacatggggctcacctcaaggacaaggccaccaggtgcgggggccgaagcccacatgatccttactctatgagcaaaatcccctgtgggggcttctccttgaagtccgccancagggctcagtctttggacccangcaggtcatggggttgtngnccaactgggggccncaacgcaaaanggcncagggcctcngncacccatcccangacgcggctacactnctggacctcccnctccaccactttcatgcgctgttcntacccgcgnatntgtcccanctgtttcngtgccnactccancttctnggacgtgcgctacatacgcccggantcncnctcccgctttgtccctatccacgtnccancaacaaatttcnccntantgcaccnattcccacntttnncagntttccncnncgngcttccttntaaaagggttganccccggaaaatnccccaaagggggggggccnggtacccaactnccccctnatagctgaantccccatnaccnngnctcnatgganccntccnttttaannacnttctnaacttgggaananccctcgnccntncccccnttaatcccnccttgcnangnncntcccccnntccncccnnntnggcntntnanncnaaaaaggcccnnnancaatctcctnncncctcanttcgccanccctcgaaatcggccnc

SEQ ID NO: 10 - DNA, 789 bp, Homo sapien
  misc_feature (1)...(789): n = A,T,C or G
cagtctatntggccagtgtggcagctttccctgtggctgccggtgccacatgcctgtcccacagtgtggccgtggtgacagcttcagccgccctcaccgggttcaccttctcagccctgcagatcctgccctacacactggcctccctctaccaccgggagaagcaggtgttcctgcccaaataccgaggggacactggaggtgctagcagtgaggacagcctgatgaccagcttcctgccaggccctaagcctggagctcccttccctaatggacacgtgggtgctggaggcagtggcctgctcccacctccacccgcgctctgcggggcctctgcctgtgatgtctccgtacgtgtggtggtgggtgagcccaccgangccagggtggttccgggccggggcatctgcctggacctcgccatcctggatagtgcttcctgctgtcccangtggccccatccctgtttatgggctccattgtccagctcagccagtctgtcactgcctatatggtgtctgccgcaggcctgggtctggtcccatttactttgctacacaggtantatttgacaagaacganttggccaaatactcagcgttaaaaaattccagcaacattgggggtggaaggcctgcctcactgggtccaactccccgctcctgttaaccccatggggctgccggcttggccgccaatttctgttgctgccaaantnatgtggctctctgctgccacctgttgctggctgaagtgcntacngcncanctnggggggtngggngttccc

SEQ ID NO: 11 - DNA, 772 bp, Homo sapien
  misc_feature (1)...(772): n = A,T,C or G
cccaccctacccaaatattagacaccaacacagaaaagctagcaatggattcccttctactttgttaaataaataagttaaatatttaaatgcctgtgtctctgtgatggcaacagaaggaccaacaggccacatcctgataaaaggtaagaggggggtggatcagcaaaaagacagtgctgtgggctgaggggacctggttcttgtgtgttgcccctcaggactcttcccctacaaataactttcatatgttcaaatcccatggaggagtgtttcatcctagaaactcccatgcaagagctacattaaacgaagctgcaggttaaggggcttanagatgggaaaccaggtgactgagtttattcagctcccaaaaacccttctctaggtgtgtctcaactaggaggctagctgttaaccctgagcctgggtaatccacctgcagagtccccgcattccagtgcatggaacccttctggcctccctgtataagtccagactgaaacccccttggaaggnctccagtcaggcagccctanaaactggggaaaaaagaaaaggacgccccancccccagctgtgcanctacgcacctcaacagcacagggtggcagcaaaaaaaccactttactttggcacaaacaaaaactngggggggcaaccccggcaccccnangggggttaacaggaancngggnaacntggaacccaattnaggcaggcccnccaccccnaatnttgctgggaaatttttcctcccctaaattntttc

SEQ ID NO: 12 - DNA, 751 bp, Homo sapien
  misc_feature (1)...(751): n = A,T,C or G
gccccaattccagctgccacaccacccacggtgactgcattagttcggatgtcatacaaaagctgattgaagcaaccctctactttttggtcgtgagccttttgcttggtgcaggtttcattggctgtgttggtgacgttgtcattgcaacagaatgggggaaaggcactgttctctttgaagtanggtgagtcctcaaaatccgtatagttggtgaagccacagcacttgagccctttcatggtggtgttccacacttgagtgaagtcttcctgggaaccataatctttcttgatggcaggcactaccagcaacgtcagggaagtgctcagccattgtggtgtacaccaaggcgaccacagcagctgcnacctcagcaatgaagatgangaggangatgaagaagaacgtcncgagggcacacttgctctcagtcttancaccatancagcccntgaaaaccaanancaaagaccacnacnccggctgcgatgaagaaatnaccccncgttgacaaacttgcatggcactggganccacagtggcccnaaaaatcttcaaaaaggatgccccatcnattgaccccccaaatgcccactgccaacaggggctgccccacncncnnaacgatganccnattgnacaagatctncntggtcttnatnaacntgaaccctgcntngtggctcctgttcaggnccnnggcctgacttctnaannaangaactcngaagnccccacnggananncg

SEQ ID NO: 13 - DNA, 729 bp, Homo sapien
  misc_feature (1)...(729): n = A,T,C or G
gagccaggcgtccctctgcctgcccactcagtggcaacacccgggagctgttttgtcctttgtggancctcagcagtnccctctttcagaactcantgccaaganccctgaacaggagccaccatgcagtgcttcagcttcattaagaccatgatgatcctcttcaatttgctcatctttctgtgtggtgcagccctgttggcagtgggcatctgggtgtcaatcgatggggcatcctttctgaagatcttcgggccactgtcgtccagtgccatgcagtttgtcaacgtgggctacttcctcatcgcagccggcgttgtggtcttagctctaggtttcctgggctgctatggtgctaagactgagagcaagtgtgccctcgtgacgttcttcttcatcctcctcctcatcttcattgctgaggttgcaatgctgtggtcgccttggtgtacaccacaatggctgagcacttcctgacgttgctggtaatgcctgccatcaanaaaagattatgggttcccaggaanacttcactcaagtgttggaacaccaccatgaaagggctcaagtgctgtggcttcnnccaactatacggattttgaagantcacctacttcaaagaaaanagtgcctttcccccatttctgttgcaattgacaaacgtccccaacacagccaattgaaaacctgcacccaacccaaangggtccccaaccanaaattnaaggg

SEQ ID NO: 14 - DNA, 816 bp, Homo sapien
  misc_feature (1)...(816): n = A,T,C or G
tgctcttcctcaaagttgttcttgttgccataacaaccaccataggtaaagcgggcgcagtgttcgctgaaggggttgtagtaccagcgcgggatgctctccttgcagagtcctgtgtctggcaggtccacgcagtgccctttgtcactggggaaatggatgcgctggagctcgtcaaagccactcgtgtatttttcacaggcagcctcgtccgacgcgtcggggcagttgggggtgtcttcacactccaggaaactgtcnatgcagcagccattgctgcagcggaactgggtgggctgacangtgccagagcacactggatggcgcctttccatgnnangggccctgngggaaagtccctganccccananctgcctctcaaangccccaccttgcacaccccgacaggctagaatggaatcttcttcccgaaaggtagttnttcttgttgcccaanccanccccntaaacaaactcttgcanatctgctccgngggggtcntantaccancgtgggaaaagaaccccaggcngcgaaccaancttgtttggatncgaagcnataatctnctnttctgcttggtggacagcaccantnactgtnnanctttagnccntggtcctcntgggttgnncttgaacctaatcnccnntcaactgggacaaggtaantngccntcctttnaattcccnancntnccccctggtttggggttttncncnctcctaccccagaaannccgtgttcccccccaactaggggccnaaaccnnttnttccacaaccctnccccacccacgggttcngntggttng

SEQ ID NO: 15 - DNA, 783 bp, Homo sapien
  misc_feature (1)...(783): n = A,T,C or G
ccaaggcctgggcaggcatanacttgaaggtacaaccccaggaacccctggtgctgaaggatgtggaaaacacagattggcgcctactgcggggtgacacggatgtcagggtagagaggaaagacccaaaccaggtggaactgtggggactcaaggaangcacctacctgttccagctgacagtgactagctcagaccacccagaggacacggccaacgtcacagtcactgtgctgtccaccaagcagacagaagactactgcctcgcatccaacaangtgggtcgctgccggggctctttcccacgctggtactatgaccccacggagcagatctgcaagagtttcgtttatggaggctgcttgggcaacaagaacaactaccttcgggaagaagagtgcattctancctgtcngggtgtgcaaggtgggcctttganangcanctctggggctcangcgactttcccccagggcccctccatggaaaggcgccatccantgttctctggcacctgtcagcccacccagttccgctgcancaatggctgctgcatcnacantttcctngaattgtgacaacaccccccantgcccccaaccctcccaacaaagcttccctgttnaaaaatacnccanttggcttttnacaaacncccggcncctccnttttccccnntnaacaaagggcnctngcntttgaactgcccnaacccnggaatctnccnnggaaaaantnccccccctggttcctnnaancccctccncnaaanctncccccccc

SEQ ID NO: 16 - DNA, 801 bp, Homo sapien
  misc_feature (1)...(801): n = A,T,C or G
gccccaattccagctgccacaccacccacggtgactgcattagttcggatgtcatacaaaagctgattgaagcaaccctctactttttggtcgtgagccttttgcttggtgcaggtttcattggctgtgttggtgacgttgtcattgcaacagaatgggggaaaggcactgttctctttgaagtagggtgagtcctcaaaatccgtatagttggtgaagccacagcacttgagccctttcatggtggtgttccacacttgagtgaagtcttcctgggaaccataatctttcttgatggcaggcactaccagcaacgtcaggaagtgctcagccattgtggtgtacaccaaggcgaccacagcagctgcaacctcagcaatgaagatgaggaggaggatgaagaagaacgtcncgagggcacacttgctctccgtcttagcaccatagcagcccangaaaccaagagcaaagaccacaacgccngctgcgaatgaaagaaantacccacgttgacaaactgcatggccactggacgacagttggcccgaanatcttcagaaaagggatgccccatcgattgaacacccanatgcccactgccnacagggctgcnccncncngaaagaatgagccattgaagaaggatcntcntggtcttaatgaactgaaaccntgcatggtggcccctgttcagggctcttggcagtgaattctganaaaaaggaacngcntnagcccccccaaanganaaaacacccccgggtgttgccctgaattggcggccaagganccctgccccng

SEQ ID NO: 17 - DNA, 740 bp, Homo sapien
  misc_feature (1)...(740): n = A,T,C or G
gtgagagccaggcgtccctctgcctgcccactcagtggcaacacccgggagctgttttgtcctttgtggagcctcagcagttccctctttcagaactcactgccaagagccctgaacaggagccaccatgcagtgcttcagcttcattaagaccatgatgatcctcttcaatttgctcatctttctgtgtggtgcagccctgttggcagtgggcatctgggtgtcaatcgatggggcatcctttctgaagatcttcgggccactgtcgtccagtgccatgcagtttgtcaacgtgggctacttcctcatcgcagccggcgttgtggtctttgctcttggtttcctgggctgctatggtgctaagacggagagcaagtgtgccctcgtgacgttcttcttcatcctcctcctcatcttcattgctgaagttgcagctgctgtggtcgccttggtgtacaccacaatggctgaaccattcctgacgttgctggtantgcctgccatcaanaaagattatgggttcccaggaaaaattcactcaantntggaacaccnccatgaaaagggctccaatttctgntggcttccccaactataccggaattttgaaagantcnccctacttccaaaaaaaaananttgcctttncccccnttctgttgcaatgaaaacntcccaanacngccaatnaaaacctgcccnnncaaaaaggntcncaaacaaaaaaantnnaagggttn

SEQ ID NO: 18 - DNA, 802 bp, Homo sapien
  misc_feature (1)...(802): n = A,T,C or G
ccgctggttgcgctggtccagngnagccacgaagcacgtcagcatacacagcctcaatcacaaggtcttccagctgccgcacattacgcagggcaagagcctccagcaacactgcatatgggatacactttactttagcagccagggtgacaactgagaggtgtcgaagcttattcttctgagcctctgttagtggaggaagattccgggcttcagctaagtagtcagcgtatgtcccataagcaaacactgtgagcagccggaaggtagaggcaaagtcactctcagccagctctctaacattgggcatgtccagcagttctccaaacacgtagacaccagnggcctccagcacctgatggatgagtgtggccagcgctgcccccttggccgacttggctaggagcagaaattgctcctggttctgccctgtcaccttcacttccgcactcatcactgcactgagtgtgggggacttgggctcaggatgtccagagacgtggttccgccccctcncttaatgacaccgnccanncaaccgtcggctcccgccgantgngttcgtcgtncctgggtcagggtctgctggccnctacttgcaancttcgtcnggcccatggaattcaccncaccggaactngtangatccactnnttctataaccggncgccaccgcnnntggaactccactcttnttncctttacttgagggttaaggtcacccttnncgttaccttggtccaaaccntnccntgtgtcganatngtnaatcnggnccnatnccanccncatangaagccng

SEQ ID NO: 19 - DNA, 731 bp, Homo sapien
  misc_feature (1)...(731): n = A,T,C or G
cnaagcttccaggtnacgggccgcnaancctgacccnaggtancanaangcagncngcgggagcccaccgtcacgnggnggngtctttatnggagggggcggagccacatcnctggacntcntgaccccaactccccnccncncantgcagtgatgagtgcagaactgaaggtnacgtggcaggaaccaagancaaannctgctccnntccaagtcggcnnagggggcggggctggccacgcncatccntcnagtgctgnaaagccccnncctgtctacttgtttggagaacngcnnngacatgcccagngttanataacnggcngagagtnantttgcctctcccttccggctgcgcancgngtntgcttagnggacataacctgactacttaactgaacccnngaatctnccncccctccactaagctcagaacaaaaaacttcgacaccactcanttgtcacctgnctgctcaagtaaagtgtaccccatncccaatgtntgctngangctctgncctgcnttangttcggtcctgggaagacctatcaattnaagctatgtttctgactgcctcttgctccctgnaacaancnacccnncnntccaagggggggncggcccccaatccccccaaccntnaattnantttanccccncccccnggcccggccttttacnancntcnnnnacngggnaaaaccnnngctttncccaacnnaatccncct

SEQ ID NO: 20 - DNA, 754 bp, Homo sapien
  misc_feature (1)...(754): n = A,T,C or G
tttttttttttttttttttttaaaaaccccctccattnaatgnaaacttccgaaattgtccaaccccctcntccaaatnnccntttccgggngggggttccaaacccaanttanntttggannttaaattaaatnttnnttggnggnnnaanccnaatgtnangaaagttnaacccantatnancttnaatncctggaaaccngtngnttccaaaaatntttaacccttaantccctccgaaatngttnanggaaaacccaanttctcntaaggttgtttgaaggntnaatnaaaancccnnccaattgtttttngccacgcctgaattaattggnttccgntgttttccnttaaaanaaggnnanccccggttantnaatccccccnnccccaattataccgantttttttngaattgggancccncgggaattaacggggnnnntccctnttggggggcnggnnccccccccntcgggggttngggncaggncnnaattgtttaagggtccgaaaaatccctccnagaaaaaaanctcccaggntgagnntngggtttnccccccccccanggcccctctcgnanagttggggtttggggggcctgggattttntttcccctnttncctcccccccccccnggganagaggttngngttttgntcnncggccccnccnaaganctttnccganttnanttaaatccntgcctnggcgaagtccnttgnagggntaaanggccccctnncggg

SEQ ID NO: 21 - DNA, 755 bp, Homo sapien
  misc_feature (1)...(755): n = A,T,C or G
atcancccatgaccccnaacnngggaccnctcanccggncnnncnaccnccggccnatcanngtnagnncactncnnttnnatcacnccccnccnactacgcccncnanccnacgcnctanncanatnccactganngcgcgangtnganngagaaanctnataccanagncaccanacnccagctgtccnanaangcctnnnatacnggnnnatccaatntgnancctccnaagtattnnncnncanatgattttcctnanccgattacccntnccccctancccctcccccccaacnacgaaggcnctggnccnaaggnngcgncnccccgctagntccccnncaagtcncncncctaaactcanccnnattacncgcttcntgagtatcactccccgaatctcaccctactcaactcaaaaanatcngatacaaaataatncaagcctgnttatnacactntgactgggtctctattttagnggtccntnaancntcctaatacttccagtctnccttcnccaatttccnaanggctctttcngacagcatnttttggttcccnnttgggttcttanngaattgcccttcntngaacgggctcntcttttccttcggttancctggnttcnnccggccagttattatttcccnttttaaattcntnccntttanttttggcnttcnaaacccccggccttgaaaacggccccctggtaaaaggttgttttganaaaatttttgttttgttcc

SEQ ID NO: 22 - DNA, 849 bp, Homo sapien
  misc_feature (1)...(849): n = A,T,C or G
tttttttttttttttangtgtngtcgtgcaggtagaggcttactacaantgtgaanacgtacgctnggantaangcgacccganttctagganncnccctaaaatcanactgtgaagatnatcctgnnnacggaanggtcaccggnngatnntgctagggtgnccnctcccannncnttncataactcngnggccctgcccaccaccttcggcggcccngngnccgggcccgggtcattngnnttaaccncactnngcnancggtttccnnccccnncngacccnggcgatccggggtnctctgtcttcccctgnagncnanaaantgggccncggncccctttacccctnnacaagccacngccntctanccncngccccccctccantnngggggactgccnanngctccgttnctngnnaccccnnngggtncctcggttgtcgantcnaccgnangccanggattccnaaggaaggtgcgttnttggcccctacccttcgctncggnncacccttcccgacnanganccgctcccgcncnncgnngcctcncctcgcaacacccgcnctcntcngtncggnnncccccccacccgcnccctcncncngncgnancnctccnccnccgtctcanncaccaccccgccccgccaggccntcanccacnggnngacnngnagcncnntcgcnccgcgcngcgncnccctcgccncngaactncntcnggccantnncgctcaanccnnacnaaacgccgctgcgcggcccgnagcgnccncctccncgagtcctcccgncttccnacccangnnttccncgaggacacnnnaccccgccnncangcgg

SEQ ID NO: 23 - DNA, 872 bp, Homo sapien
  misc_feature (1)...(872): n = A,T,C or G
gcgcaaactatacttcgctcgnactcgtgcgcctcgctnctcttttcctccgcaaccatgtctgacnancccgattnggcngatatcnanaagntcgancagtccaaactgantaacacacacacncnanaganaaatccnctgccttccanagtanacnattgaacnngagaaccangcnggcgaatcgtaatnaggcgtgcgccgccaatntgtcnccgtttattntnccagcntcncctnccnaccctacntcttcnnagctgtcnnacccctngtncgnaccccccnaggtcgggatcgggtttnnnntgaccgngcnncccctccccccntccatnacganccncccgcaccaccnanngcncgcnccccgnnctcttcgccnccctgtcctntncccctgtngcctggcncngnaccgcattgaccctcgccnnctncnngaaancgnanacgtccgggttgnnannancgctgtgggnnngcgtctgcnccgcgttccttccnncnncttccaccatcttcnttacngggtctccncgccntctcnnncacnccctgggacgctntcctntgccccccttnactcccccccttcgncgtgncccgnccccaccntcatttncanacgntcttcacaannncctggntnnctcccnancngncngtcanccnagggaagggnggggnnccnntgnttgacgttgnggngangtccgaanantcctcnccntcancnctacccctcgggcgnnctctcngttnccaacttancaantctcccccgngngcncntctcagcctcncccnccccnctctctgcantgtnctctgctctnaccnntacgantnttcgncnccctctttcc

SEQ ID NO: 24 - DNA, 815 bp, Homo sapien
  misc_feature (1)...(815): n = A,T,C or G
gcatgcaagcttgagtattctatagngtcacctaaatancttggcntaatcatggtcntanctgncttcctgtgtcaaatgtatacnaantanatatgaatctnatntgacaaganngtatcntncattagtaacaantgtnntgtccatcctgtcngancanattcccatnnattncgncgcattcncngcncantatntaatngggaantcnnntnnnncaccnncatctatcntnccgcnccctgactggnagagatggatnanttctnntntgaccnacatgttcatcttggattnaananccccccgcngnccaccggttngnngcnagccnntcccaagacctcctgtggaggtaacctgcgtcaganncatcaaacntgggaaacccgcnnccangtnnaagtngnnncanangatcccgtccaggnttnaccatcccttcncagcgccccctttngtgccttanagngnagcgtgtccnanccnctcaacatganacgcgccagnccanccgcaattnggcacaatgtcgncgaaccccctagggggantnatncaaanccccaggattgtccncncangaaatcccncanccccnccctacccnnctttgggacngtgaccaantcccggagtnccagtccggccngnctcccccaccggtnnccntgggggggtgaanctcngnntcanccngncgaggnntcgnaaggaaccggncctnggncgaanngancnntcngaagngccncntcgtataaccccccctcnccanccnacngntagntcccccccngggtncggaangg

SEQ ID NO: 25 - DNA, 775 bp, Homo sapien
  misc_feature (1)...(775): n = A,T,C or G
ccgagatgtctcgctccgtggccttagctgtgctcgcgctactctctctttctggcctggaggctatccagcgtactccaaagattcaggtttactcacgtcatccagcagagaatggaaagtcaaatttcctgaattgctatgtgtctgggtttcatccatccgacattgaanttgacttactgaagaatgganagagaattgaaaaagtggagcattcagacttgtctttcagcaaggactggtctttctatctcntgtactacactgaattcacccccactgaaaaagatgagtatgcctgccgtgtgaaccatgtgactttgtcacagcccaagatagttaagtgggatcgagacatgtaagcagncnncatggaagtttgaagatgccgcatttggattggatgaattccaaattctgcttgcttgcnttttaatantgatatgcntatacaccctaccctttatgnccccaaattgtaggggttacatnantgttcncntnggacatgatcttcctttataantccnccnttcgaattgcccgtcncccngttnngaatgtttccnnaaccacggttggctcccccaggtcncctcttacggaagggcctgggccnctttncaaggttgggggaaccnaaaatttcncttntgcccncccnccacnntcttgngnncncantttggaacccttccnattccccttggcctcnnanccttnnctaanaaaacttnaaancgtngcnaaanntttnacttccccccttacc

SEQ ID NO: 26 - DNA, 820 bp, Homo sapien
  misc_feature (1)...(820): n = A,T,C or G
anattantacagtgtaatcttttcccagaggtgtgtanagggaacggggcctagaggcatcccanagatancttatancaacagtgctttgaccaagagctgctgggcacatttcctgcagaaaaggtggcggtccccatcactcctcctctcccatagccatcccagaggggtgagtagccatcangccttcggtgggagggagtcanggaaacaacanaccacagagcanacagaccantgatgaccatgggcgggagcgagcctcttccctgnaccggggtggcananganagcctanctgaggggtcacactataaacgttaacgaccnagatnancacctgcttcaagtgcacccttcctacctgacnaccagngaccnnnaactgcngcctggggacagcnctgggancagctaacnnagcactcacctgcccccccatggccgtncgcntccctggtcctgncaagggaagctccctgttggaattncgggganaccaaggganccccctcctccanctgtgaaggaaaaanngatggaattttncccttccggccnntcccctcttcctttacacgccccctnntactcntctccctctnttntcctgncncacttttnaccccnnnatttcccttnattgatcggannctnganattccactnncgcctnccntcnatcngnaanacnaaanactntctnacccnggggatgggnncctcgntcatcctctctttttcnctaccnccnnttctttgcctctccttngatcatccaaccntcgntggccntncccccccnnntcctttnccc

SEQ ID NO: 27 - DNA, 818 bp, Homo sapien
  misc_feature (1)...(818): n = A,T,C or G
tctgggtgatggcctcttcctcctcagggacctctgactgctctgggccaaagaatctcttgtttcttctccgagccccaggcagcggtgattcagccctgcccaacctgattctgatgactgcggatgctgtgacggacccaaggggcaaatagggtcccagggtccagggaggggcgcctgctgagcacttccgcccctcaccctgcccagcccctgccatgagctctgggctgggtctccgcctccagggttctgctcttccangcangccancaagtggcgctgggccacactggcttcttcctgccccntccctggctctgantctctgtcttcctgtcctgtgcangcnccttggatctcagtttccctcnctcanngaactctgtttctganntcttcanttaactntgantttatnaccnantggnctgtnctgtcnnactttaatgggccngaccggctaatccctccctcnctcccttccanttcnnnnaaccngcttnccntcntctccccntancccgccngggaancctcctttgccctnaccangggccnnnaccgcccntnnctnggggggcnnggtnnctncncctgntnnccccnctcncnnttncctcgtcccnncnncgcnnngcannttcncngtcccnntnnctcttcnngtntcgnaangntcncntntnnnnngncnngntnntncntccctctcnccnnntgnangtnnttnnnncncngnnccccnnnncnnnnnnggnnntnnntctncncngccccnncccccngnattaaggcctccnntctccggccnc

SEQ ID NO: 28 - DNA, 731 bp, Homo sapien
  misc_feature (1)...(731): n = A,T,C or G
aggaagggcggagggatattgtangggattgagggataggagnataangggggaggtgtgtcccaacatganggtgnngttctcttttgaangagggttgngtttttannccnggtgggtgattnaaccccattgtatggagnnaaaggntttnagggatttttcggctcttatcagtatntanattcctgtnaatcggaaaatnatntttcnncnggaaaatnttgctcccatccgnaaattnctcccgggtagtgcatnttngggggncngccangtttcccaggctgctanaatcgtactaaagnttnaagtgggantncaaatgaaaacctnncacagagnatccntacccgactgtnnnttnccttcgccctntgactctgcnngagcccaatacccnngngnatgtcncccngnnnngcgncnctgaaannnnctcgnggctnngancatcanggggtttcgcatcaaaagcnncgtttcncatnaaggcactttngcctcatccaaccnctngccctcnnccatttngccgtcnggttcncctacgctnntngcncctnnntnganattttncccgcctngggnaancctcctgnaatgggtagggncttntcttttnaccnngnggtntactaatcnnctncacgcntnctttctcnaccccccccctttttcaatcccancggcnaatggggtctccccnncganggggggnnncccanncc

SEQ ID NO: 29 - DNA, 822 bp, Homo sapien
  misc_feature (1)...(822): n = A,T,C or G
actagtccagtgtggtggaattccattgtgttggggncncttctatgantantnttagatcgctcanacctcacancctcccnacnangcctataangaanannaataganctgtncnntatntntacnctcatanncctcnnnacccactccctcttaacccntactgtgcctatngcntnnctantctntgccgcctncnanccaccngtgggccnaccncnngnattctcnatctcctcnccatntngcctanantangtncataccctatacctacnccaatgctannnctaancntccatnanttannntaactaccactgacntngactttcncatnanctcctaatttgaatctactctgactcccacngcctannnattagcancntcccccnacnatntctcaaccaaatcntcaacaacctatctanctgttcnccaaccnttncctccgatccccnnacaacccccctcccaaatacccnccacctgacncctaacccncaccatcccggcaagccnanggncatttanccactggaatcacnatngganaaaaaaaacccnaactctctancncnnatctccctaanaaatnctcctnnaatttactnncantnccatcaancccacntgaaacnnaacccctgtttttanatcccttctttcgaaaaccnaccctttannncccaacctttngggcccccccnctncccnaatgaaggncncccaatcnangaaacgnccntgaaaaancnaggcnaanannntccgcanatcctatcccttanttnggggncccttncccngggcccc

SEQ ID NO: 30 - DNA, 787 bp, Homo sapien
  misc_feature (1)...(787): n = A,T,C or G
cggccgcctgctctggcacatgcctcctgaatggcatcaaaagtgatggactgcccattgctagagaagaccttctctcctactgtcattatggagccctgcagactgagggctccccttgtctgcaggatttgatgtctgaagtcgtggagtgtggcttggagctcctcatctacatnagctggaagccctggagggcctctctcgccagcctcccccttctctccacgctctccanggacaccaggggctccaggcagcccattattcccagnangacatggtgtttctccacgcggacccatggggcctgnaaggccagggtctcctttgacaccatctctcccgtcctgcctggcaggccgtgggatccactanttctanaacggncgccaccncggtgggagctccagcttttgttcccnttaatgaaggttaattgcncgcttggcgtaatcatnggtcanaactntttcctgtgtgaaattgtttntcccctcncnattccncncnacatacnaacccggaancataaagtgttaaagcctgggggtngcctnnngaatnaactnaactcaattaattgcgttggctcatggcccgctttccnttcnggaaaactgtcntcccctgcnttnntgaatcggccaccccccngggaaaagcggtttgcnttttngggggntccttccncttcccccctcnctaanccctncgcctcggtcgttncnggtngcggggaangggnatnnnctcccncnaagggggngagnnngntatccccaaa

SEQ ID NO: 31 - DNA, 799 bp, Homo sapien
  misc_feature (1)...(799): n = A,T,C or G
tttttttttttttttttggcgatgctactgtttaattgcaggaggtgggggtgtgtgtaccatgtaccagggctattagaagcaagaaggaaggagggagggcagagcgccctgctgagcaacaaaggactcctgcagccttctctgtctgtctcttggcgcaggcacatggggaggcctcccgcagggtgggggccaccagtccaggggtgggagcactacanggggtgggagtgggtggtggctggtncnaatggcctgncacanatccctacgattcttgacacctggatttcaccaggggaccttctgttctcccanggnaacttcntnnatctcnaaagaacacaactgtttcttcngcanttctggctgttcatggaaagcacaggtgtccnatttnggctgggacttggtacatatggttccggcccacctctcccntcnaanaagtaattcacccccccccnccntctnttgcctgggcccttaantacccacaccggaactcanttanttattcatcttnggntgggcttgntnatcnccncctgaangcgccaagttgaaaggccacgccgtncccnctccccatagnannttttnncntcanctaatgcccccccnggcaacnatccaatccccccccntgggggccccagcccanggcccccgnctcgggnnnccngncncgnantccccaggntctcccantcngncccnnngcncccccgcacgcagaacanaaggntngagccnccgcannnnnnnggtnncnacctcgccccccccnncgnng

SEQ ID NO: 32 - DNA, 789 bp, Homo sapien
  misc_feature (1)...(789): n = A,T,C or G
ttttttttttttttttttttttttttttttttttttttttttttttttttttttttttttttttnccnagggcaggtttattgacaacctcncgggacacaancaggctggggacaggacggcaacaggctccggcggcggcggcggcggccctacctgcggtaccaaatntgcagcctccgctcccgcttgatnttcctctgcagctgcaggatgccntaaaacagggcctcggccntnggtgggcaccctgggatttnaatttccacgggcacaatgcggtcgcancccctcaccaccnattaggaatagtggtnttacccnccnccgttggcncactccccntggaaaccacttntcgcggctccggcatctggtcttaaaccttgcaaacnctggggccctctttttggttantntnccngccacaatcatnactcagactggcncgggctggccccaaaaaancnccccaaaaccggnccatgtcttnncggggttgctgcnatntncatcacctcccgggcncancaggncaacccaaaagttcttgnggcccncaaaaaanctccggggggncccagtttcaacaaagtcatcccccttggcccccaaatcctccccccgnttnctgggtttgggaacccacgcctctnnctttggnnggcaagntggntcccccttcgggcccccggtgggcccnnctctaangaaaacnccntcctnnncaccatccccccnngnnacgnctancaangnatccctttttttanaaacgggccccccncg

SEQ ID NO: 33 - DNA, 793 bp, Homo sapien
  misc_feature (1)...(793): n = A,T,C or G
gacagaacatgttggatggtggagcacctttctatacgacttacaggacagcagatggggaattcatggctgttggagcaatanaaccccagttctacgagctgctgatcaaaggacttggactaaagtctgatgaacttcccaatcagatgagcatggatgattggccagaaatgaanaagaagtttgcagatgtatttgcaaagaagacgaaggcagagtggtgtcaaatctttgacggcacagatgcctgtgtgactccggttctgacttttgaggaggttgttcatcatgatcacaacaangaacggggctcgtttatcaccantgaggagcaggacgtgagcccccgccctgcacctctgctgttaaacaccccagccatcccttctttcaaaagggatccactacttctagagcggncgccaccgcggtggagctccagcttttgttccctttagtgagggttaattgcgcgcttggcgtaatcatggtcatanctgtttcctgtgtgaaattgttatccgctcacaattccacacaacatacganccggaagcatnaaattttaaagcctggnggtngcctaatgantgaactnactcacattaattggctttgcgctcactgcccgctttccagtccggaaaacctgtccttgccagctgccnttaatgaatcnggccaccccccggggaaaaggcngtttgcttnttggggcgcncttcccgctttctcgcttcctgaantccttccccccggtctttcggcttgcggcnaacggtatcnacct

SEQ ID NO: 34 - DNA, 756 bp, Homo sapien
  misc_feature (1)...(756): n = A,T,C or G
gccgcgaccggcatgtacgagcaactcaagggcgagtggaaccgtaaaagccccaatcttancaagtgcggggaanagctgggtcgactcaagctagttcttctggagctcaacttcttgccaaccacagggaccaagctgaccaaacagcagctaattctggcccgtgacatactggagatcggggcccaatggagcatcctacgcaangacatcccctccttcgagcgctacatggcccagctcaaatgctactactttgattacaangagcagctccccgagtcagcctatatgcaccagctcttgggcctcaacctcctcttcctgctgtcccagaaccgggtggctgantnccacacgganttggancggctgcctgcccaangacatacanaccaatgtctacatcnaccaccagtgtcctggagcaatactgatgganggcagctaccncaaagtnttcctggccnagggtaacatcccccgccgagagctacaccttcttcattgacatcctgctcgacactatcagggatgaaaatcgcngggttgctccagaaaggctncaanaanatccttttcnctgaaggcccccggatncnctagtnctagaatcggcccgccatcgcggtggancctccaacctttcgttnccctttactgagggttnattgccgcccttggcgttatcatggtcacnccngttncctgtgttgaaattnttaaccccccacaattccacgccnacattng

SEQ ID NO: 35 - DNA, 834 bp, Homo sapien
  misc_feature (1)...(834): n = A,T,C or G
ggggatctctanatcnacctgnatgcatggttgtcggtgtggtcgctgtcgatgaanatgaacaggatcttgcccttgaagctctcggctgctgtntttaagttgctcagtctgccgtcatagtcagacacnctcttgggcaaaaaacancaggatntgagtcttgatttcacctccaataatcttcngggctgtctgctcggtgaactcgatgacnangggcagctggttgtgtntgataaantccancangttctccttggtgacctccccttcaaagttgttccggccttcatcaaacttctnnaanangannancccanctttgtcgagctggnatttgganaacacgtcactgttggaaactgatcccaaatggtatgtcatccatcgcctctgctgcctgcaaaaaacttgcttggcncaaatccgactccccntccttgaaagaagccnatcacacccccctccctggactccnncaangactctnccgctnccccntccnngcagggttggtggcannccgggcccntgcgcttcttcagccagttcacnatnttcatcagcccctctgccagctgttntattccttgggggggaanccgtctctcccttcctgaannaactttgaccgtnggaatagccgcgcntcnccntacntnctgggccgggttcaaantccctccnttgncnntcncctcgggccattctggatttnccnaactttttccttcccccnccccncggngtttggntttttcatngggccccaactctgctnttggccantcccctgggggcntntancnccccctntggtcccntngggcc

SEQ ID NO: 36 - DNA, 814 bp, Homo sapien
  misc_feature (1)...(814): n = A,T,C or G
cggncgctttccngccgcgccccgtttccatgacnaaggctcccttcangttaaatacnncctagnaaacattaatgggttgctctactaatacatcatacnaaccagtaagcctgcccanaacgccaactcaggccattcctaccaaaggaagaaaggctggtctctccaccccctgtaggaaaggcctgccttgtaagacaccacaatncggctgaatctnaagtcttgtgttttactaatggaaaaaaaaaataaacaanaggttttgttctcatggctgcccaccgcagcctggcactaaaacancccagcgctcacttctgcttgganaaatattctttgctcttttggacatcaggcttgatggtatcactgccacntttccacccagctgggcncccttcccccatntttgtcantganctggaaggcctgaancttagtctccaaaagtctcngcccacaagaccggccaccaggggangtcntttncagtggatctgccaaanantacccntatcatcnntgaataaaaaggcccctgaacganatgcttccancancctttaagacccataatcctngaaccatggtgcccttccggtctgatccnaaaggaatgttcctgggtcccantccctcctttgttncttacgttgtnttggacccntgctngnatnacccaantganatccccngaagcaccctncccctggcatttgantttcntaaattctctgccctacnnctgaaagcacnattccctnggcnccnaanggngaactcaagaaggtctnngaaaaaccacncn

SEQ ID NO: 37 - DNA, 760 bp, Homo sapien
  misc_feature (1)...(760): n = A,T,C or G
gcatgctgctcttcctcaaagttgttcttgttgccataacaaccaccataggtaaagcgggcgcagtgttcgctgaaggggttgtagtaccagcgcgggatgctctccttgcagagtcctgtgtctggcaggtccacgcaatgccctttgtcactggggaaatggatgcgctggagctcgtcnaanccactcgtgtatttttcacangcagcctcctccgaagcntccgggcagttgggggtgtcgtcacactccactaaactgtcgatncancagcccattgctgcagcggaactgggtgggctgacaggtgccagaacacactggatnggcctttccatggaagggcctgggggaaatcncctnancccaaactgcctctcaaaggccaccttgcacaccccgacaggctagaaatgcactcttcttcccaaaggtagttgttcttgttgcccaagcancctccancaaaccaaaancttgcaaaatctgctccgtgggggtcatnnntaccanggttggggaaanaaacccggcngnganccnccttgtttgaatgcnaaggnaataatcctcctgtcttgcttgggtggaanagcacaattgaactgttaacnttgggccgngttccnctngggtggtctgaaactaatcaccgtcactggaaaaaggtangtgccttccttgaattcccaaanttcccctngntttgggtnntttctcctctnccctaaaaatcgtnttccccccccntanggcg

SEQ ID NO: 38 - DNA, 724 bp, Homo sapien
  misc_feature (1)...(724): n = A,T,C or G
tttttttttttttttttttttttttttttttttttaaaaaccccctccattgaatgaaaacttccnaaattgtccaaccccctcnnccaaatnnccatttccgggggggggttccaaacccaaattaattttggantttaaattaaatnttnattnggggaanaanccaaatgtnaagaaaatttaacccattatnaacttaaatncctngaaacccntggnttccaaaaatttttaacccttaaatccctccgaaattgntaanggaaaaccaaattcncctaaggctntttgaaggttngatttaaacccccttnanttnttttnacccnngnctnaantatttngnttccggtgttttcctnttaancntnggtaactcccgntaatgaannnccctaanccaattaaaccgaattttttttgaattggaaattccnngggaattnaccggggtttttcccntttgggggccatncccccnctttcggggtttgggnntaggttgaatttttnnangncccaaaaaancccccaanaaaaaaactcccaagnnttaattngaatntcccccttcccaggccttttgggaaaggngggtttntgggggccnggganttcnttcccccnttnccnccccccccccnggtaaanggttatngnntttggtttttgggccccttnanggaccttccggatngaaattaaatccccgggncggccg

SEQ ID NO: 39 - DNA, 751 bp, Homo sapien
  misc_feature (1)...(751): n = A,T,C or G
tttttttttttttttctttgctcacatttaatttttattttgattttttttaatgctgcacaacacaatatttatttcatttgtttcttttatttcattttatttgtttgctgctgctgttttatttatttttactgaaagtgagagggaacttttgtggccttttttcctttttctgtaggccgccttaagctttctaaatttggaacatctaagcaagctgaanggaaaagggggtttcgcaaaatcactcgggggaanggaaaggttgctttgttaatcatgccctatggtgggtgattaactgcttgtacaattacntttcacttttaattaattgtgctnaangctttaattanacttgggggttccctccccanaccaaccccnctgacaaaaagtgccngccctcaaatnatgtcccggcnntcnttgaaacacacngcngaangttctcattntccccncnccaggtnaaaatgaagggttaccatntttaacnccacctccacntggcnnngcctgaatcctcnaaaancnccctcaancnaattnctnngccccggtcncgcntnngtcccncccgggctccgggaantncacccccngaanncnntnncnaacnaaattccgaaaatattcccnntcnctcaattcccccnnagactntcctcnncnancncaattttcttttnntcacgaacncgnnccnnaaaatgnnnnncncctccnctngtccnnaatcnccanc

SEQ ID NO: 40 - DNA, 753 bp, Homo sapien
  misc_feature (1)...(753): n = A,T,C or G
gtggtattttctgtaagatcaggtgttcctccctcgtaggtttagaggaaacaccctcatagatgaaaacccccccgagacagcagcactgcaactgccaagcagccggggtaggaggggcgccctatgcacagctgggcccttgagacagcagggcttcgatgtcaggctcgatgtcaatggtctggaagcggcggctgtacctgcgtaggggcacaccgtcagggcccaccaggaacttctcaaagttccaggcaacntcgttgcgacacaccggagaccaggtgatnagcttggggtcggtcataancgcggtggcgtcgtcgctgggagctggcagggcctcccgcaggaaggcnaataaaaggtgcgcccccgcaccgttcanctcgcacttctcnaanaccatgangttgggctcnaacccaccaccannccggacttccttganggaattcccaaatctcttcgntcttgggcttctnctgatgccctanctggttgcccngnatgccaancanccccaanccccggggtcctaaancacccncctcctcntttcatctgggttnttntccccggaccntggttcctctcaagggancccatatctcnaccantactcaccntncccccccntgnnacccanccttctanngnttcccncccgncctctggcccntcaaanangcttncacnacctgggtctgccttcccccctnccctatctgnaccccncntttgtctcantnt

SEQ ID NO: 41 - DNA, 341 bp, Homo sapien
actatatccatcacaacagacatgcttcatcccatagacttcttgacatagcttcaaatgagtgaacccatccttgatttatatacatatatgttctcagtattttgggagcctttccacttctttaaaccttgttcattatgaacactgaaaataggaatttgtgaagagttaaaaagttatagcttgtttacgtagtaagtttttgaagtctacattcaatccagacacttagttgagtgttaaactgtgatttttaaaaaatatcatttgagaatattctttcagaggtattttcatttttactttttgattaattgtgttttatatattagggtagt

SEQ ID NO: 42 - DNA, 101 bp, Homo sapien
acttactgaatttagttctgtgctcttccttatttagtgttgtatcataaatactttgatgtttcaaacattctaaataaataattttcagtggcttcata

SEQ ID NO: 43 - DNA, 305 bp, Homo sapien
acatctttgttacagtctaagatgtgttcttaaatcaccattccttcctggtcctcaccctccagggtggtctcacactgtaattagagctattgaggagtctttacagcaaattaagattcagatgccttgctaagtctagagttctagagttatgtttcagaaagtctaagaaacccacctcttgagaggtcagtaaagaggacttaatatttcatatctacaaaatgaccacaggattggatacagaacgagagttatcctggataactcagagctgagtacctgcccgggggccgctcgaa

SEQ ID NO: 44 - DNA, 852 bp, Homo sapien
  misc_feature (1)...(852): n = A,T,C or G
acataaatatcagagaaaagtagtctttgaaatatttacgtccaggagttctttgtttctgattatttggtgtgtgttttggtttgtgtccaaagtattggcagcttcagttttcattttctctccatcctcgggcattcttcccaaatttatataccagtcttcgtccatccacacgctccagaatttctcttttgtagtaatatctcatagctcggctgagcttttcataggtcatgctgctgttgttcttctttttaccccatagctgagccactgcctctgatttcaagaacctgaagacgccctcagatcggtcttcccattttattaatcctgggttcttgtctgggttcaagaggatgtcgcggatgaattcccataagtgagtccctctcgggttgtgctttttggtgtggcacttggcaggggggtcttgctcctttttcatatcaggtgactctgcaacaggaaggtgactggtggttgtcatggagatctgagcccggcagaaagttttgctgtccaacaaatctactgtgctaccatagttggtgtcatataaatagttctngtctttccaggtgttcatgatggaaggctcagtttgttcagtcttgacaatgacattgtgtgtggactggaacaggtcactactgcactggccgttccacttcagatgctgcaagttgctgtagaggagntgccccgccgtccctgccgcccgggtgaactcctgcaaactcatgctgcaaaggtgctcgccgttgatgtcgaactcntggaaagggatacaattggcatccagctggttggtgtccaggaggtgatggagccactcccacacctggt

SEQ ID NO: 45 - DNA, 234 bp, Homo sapien
acaacagacccttgctcgctaacgacctcatgctcatcaagttggacgaatccgtgtccgagtctgacaccatccggagcatcagcattgcttcgcagtgccctaccgcggggaactcttgcctcgtttctggctggggtctgctggcgaacggcagaatgcctaccgtgctgcagtgcgtgaacgtgtcggtggtgtctgaggaggtctgcagtaagctctatgacccgctgt

SEQ ID NO: 46 - DNA, 590 bp, Homo sapien
  misc_feature (1)...(590): n = A,T,C or G
actttttatttaaatgtttataaggcagatctatgagaatgatagaaaacatggtgtgtaatttgatagcaatattttggagattacagagttttagtaattaccaattacacagttaaaaagaagataatatattccaagcanatacaaaatatctaatgaaagatcaaggcaggaaaatgantataactaattgacaatggaaaatcaattttaatgtgaattgcacattatcctttaaaagctttcaaaanaaanaattattgcagtctanttaattcaaacagtgttaaatggtatcaggataaanaactgaagggcanaaagaattaattttcacttcatgtaacncacccanatttacaatggcttaaatgcanggaaaaagcagtggaagtagggaagtantcaaggtctttctggtctctaatctgccttactctttgggtgtggctttgatcctctggagacagctgccagggctcctgttatatccacaatcccagcagcaagatgaagggatgaaaaaggacacatgctgccttcctttgaggagacttcatctcactggccaacactcagtcacatgt

SEQ ID NO: 47 - DNA, 774 bp, Homo sapien
  misc_feature (1)...(774): n = A,T,C or G
acaagggggcataatgaaggagtgggganagattttaaagaaggaaaaaaaacgaggccctgaacagaattttcctgnacaacggggcttcaaaataattttcttggggaggttcaagacgcttcactgcttgaaacttaaatggatgtgggacanaattttctgtaatgaccctgagggcattacagacgggactctgggaggaaggataaacagaaaggggacaaaggctaatcccaaaacatcaaagaaaggaaggtggcgtcatacctcccagcctacacagttctccagggctctcctcatccctggaggacgacagtggaggaacaactgaccatgtccccaggctcctgtgtgctggctcctggtcttcagcccccagctctggaagcccaccctctgctgatcctgcgtggcccacactccttgaacacacatccccaggttatattcctggacatggctgaacctcctattcctacttccgagatgccttgctccctgcagcctgtcaaaatcccactcaccctccaaaccacggcatgggaagcctttctgacttgcctgattactccagcatcttggaacaatccctgattccccactccttagaggcaagatagggtggttaagagtagggctggaccacttggagccaggctgctggcttcaaattntggctcatttacgagctatgggaccttgggcaagtnatcttcacttctatgggcntcattttgttctacctgcaaaatgggggataataatagt

SEQ ID NO: 48 - DNA, 124 bp, Homo sapien
  misc_feature (1)...(124): n = A,T,C or G
canaaattgaaattttataaaaaggcatttttctcttatatccataaaatgatataatttttgcaantatanaaatgtgtcataaattataatgttccttaattacagctcaacgcaacttggt

SEQ ID NO: 49 - DNA, 147 bp, Homo sapien
  misc_feature (1)...(147): n = A,T,C or G
gccgatgctactattttattgcaggaggtgggggtgtttttattattctctcaacagctttgtggctacaggtggtgtctgactgcatnaaaaanttttttacgggtgattgcaaaaattttagggcacccatatcccaagcantgt

SEQ ID NO: 50 - DNA, 107 bp, Homo sapien
acattaaattaataaaaggactgttggggttctgctaaaacacatggcttgatatattgcatggtttgaggttaggaggagttaggcatatgttttgggagaggggt

SEQ ID NO: 51 - DNA, 204 bp, Homo sapien
gtcctaggaagtctaggggacacacgactctggggtcacggggccgacacacttgcacggcgggaaggaaaggcagagaagtgacaccgtcagggggaaatgacagaaaggaaaatcaaggccttgcaaggtcagaaaggggactcagggcttccaccacagccctgccccacttggccacctcccttttgggaccagcaatgt

SEQ ID NO: 52 - DNA, 491 bp, Homo sapien
  misc_feature (1)...(491): n = A,T,C or G
acaaagataacatttatcttataacaaaaatttgatagttttaaaggttagtattgtgtagggtattttccaaaagactaaagagataactcaggtaaaaagttagaaatgtataaaacaccatcagacaggtttttaaaaaacaacatattacaaaattagacaatcatccttaaaaaaaaaacttcttgtatcaatttcttttgttcaaaatgactgacttaantatttttaaatatttcanaaacacttcctcaaaaattttcaanatggtagctttcanatgtnccctcagtcccaatgttgctcagataaataaatctcgtgagaacttaccacccaccacaagctttctggggcatgcaacagtgtcttttctttnctttttctttttttttttttacaggcacagaaactcatcaattttatttggataacaaagggtctccaaattatattgaaaaataaatccaagttaatatcactcttgt

SEQ ID NO: 53 - DNA, 484 bp, Homo sapien
  misc_feature (1)...(484): n = A,T,C or G
acataatttagcagggctaattaccataagatgctatttattaanaggtntatgatctgagtattaacagttgctgaagtttggtatttttatgcagcattttctttttgctttgataacactacagaacccttaaggacactgaaaattagtaagtaaagttcagaaacattagctgctcaatcaaatctctacataacactatagtaattaaaacgttaaaaaaaagtgttgaaatctgcactagtatanaccgctcctgtcaggataanactgctttggaacagaaagggaaaaancagctttgantttctttgtgctgatangaggaaaggctgaattaccttgttgcctctccctaatgattggcaggtcnggtaaatnccaaaacatattccaactcaacacttcttttccncgtancttgantctgtgtattccaggancaggcggatggaatgggccagcccncggatgttccant

SEQ ID NO: 54 - DNA, 151 bp, Homo sapien
actaaacctcgtgcttgtgaactccatacagaaaacggtgccatccctgaacacggctggccactgggtatactgctgacaaccgcaacaacaaaaacacaaatccttggcactggctagtctatgtcctctcaagtgcctttttgtttgt

SEQ ID NO: 55 - DNA, 91 bp, Homo sapien
acctggcttgtctccgggtggttcccggcgccccccacggtccccagaacggacactttcgccctccagtggatactcgagccaaagtggt

SEQ ID NO: 56 - DNA, 133 bp, Homo sapien
ggcggatgtgcgttggttatatacaaatatgtcattttatgtaagggacttgagtatacttggatttttggtatctgtgggttggggggacggtccaggaaccaataccccatggataccaagggacaactgt

SEQ ID NO: 57 - DNA, 147 bp, Homo sapien
  misc_feature (1)...(147): n = A,T,C or G
actctggagaacctgagccgctgctccgcctctgggatgaggtgatgcangcngtggcgcgactgggagctgagcccttccctttgcgcctgcctcagaggattgttgccgacntgcanatctcantgggctggatncatgcagggt

SEQ ID NO: 58 - DNA, 198 bp, Homo sapien
  misc_feature (1)...(198): n = A,T,C or G
acagggatataggtttnaagttattgtnattgtaaaatacattgaattttctgtatactctgattacatacatttatcctttaaaaaagatgtaaatcttaatttttatgccatctattaatttaccaatgagttaccttgtaaatgagaagtcatgatagcactgaattttaactagttttgacttctaagtttggt

SEQ ID NO: 59 - DNA, 330 bp, Homo sapien
acaacaaatgggttgtgaggaagtcttatcagcaaaactggtgatggctactgaaaagatccattgaaaattatcattaatgattttaaatgacaagttatcaaaaactcactcaattttcacctgtgctagcttgctaaaatgggagttaactctagagcaaatatagtatcttctgaatacagtcaataaatgacaaagccagggcctacaggtggtttccagactttccagacccagcagaaggaatctattttatcacatggatctccgtctgtgctcaaaatacctaatgatatttttcgtctttattggacttctttgaagagt

SEQ ID NO: 60 - DNA, 175 bp, Homo sapien
accgtgggtgccttctacattcctgacggctccttcaccaacatctggttctacttcggcgtcgtgggctccttcctcttcatcctcatccagctggtgctgctcatcgactttgcgcactcctggaaccagcggtggctgggcaaggccgaggagtgcgattcccgtgcctggt

SEQ ID NO: 61 - DNA, 154 bp, Homo sapien
accccacttttcctcctgtgagcagtctggacttctcactgctacatgatgagggtgagtggttgttgctcttcaacagtatcctcccctttccggatctgctgagccggacagcagtgctggactgcacagccccggggctccacattgctgt

SEQ ID NO: 62 - DNA, 30 bp, Homo sapien
cgctcgagccctatagtgagtcgtattaga

SEQ ID NO: 63 - DNA, 89 bp, Homo sapien
acaagtcatttcagcaccctttgctcttcaaaactgaccatcttttatatttaatgcttcctgtatgaataaaaatggttatgtcaagt

SEQ ID NO: 64 - DNA, 97 bp, Homo sapien
accggagtaactgagtcgggacgctgaatctgaatccaccaataaataaaggttctgcagaatcagtgcatccaggattggtccttggatctggggt

SEQ ID NO: 65 - DNA, 377 bp, Homo sapien
  misc_feature (1)...(377): n = A,T,C or G
acaacaanaantcccttctttaggccactgatggaaacctggaacccccttttgatggcagcatggcgtcctaggccttgacacagcggctggggtttgggctntcccaaaccgcacaccccaaccctggtctacccacanttctggctatgggctgtctctgccactgaacatcagggttcggtcataanatgaaatcccaanggggacagaggtcagtagaggaagctcaatgagaaaggtgctgtttgctcagccagaaaacagctgcctggcattcgccgctgaactatgaacccgtgggggtgaactacccccangaggaatcatgcctgggcgatgcaanggtgccaacaggaggggcgggaggagcatgt

SEQ ID NO: 66 - DNA, 305 bp, Homo sapien
acgcctttccctcagaattcagggaagagactgtcgcctgccttcctccgttgttgcgtgagaacccgtgtgccccttcccaccatatccaccctcgctccatctttgaactcaaacacgaggaactaactgcaccctggtcctctccccagtccccagttcaccctccatccctcaccttcctccactctaagggatatcaacactgcccagcacaggggccctgaatttatgtggtttttatatattttttaataagatgcactttatgtcattttttaataaagtctgaagaattactgttt

SEQ ID NO: 67 - DNA, 385 bp, Homo sapien
actacacacactccacttgcccttgtgagacactttgtcccagcactttaggaatgctgaggtcggaccagccacatctcatgtgcaagattgcccagcagacatcaggtctgagagttccccttttaaaaaaggggacttgcttaaaaaagaagtctagccacgattgtgtagagcagctgtgctgtgctggagattcacttttgagagagttctcctctgagacctgatctttagaggctgggcagtcttgcacatgagatggggctggtctgatctcagcactccttagtctgcttgcctctcccagggccccagcctggccacacctgcttacagggcactctcagatgcccataccatagtttctgtgctagtggaccgt

SEQ ID NO: 68 - DNA, 73 bp, Homo sapien
acttaaccagatatatttttaccccagatggggatattctttgtaaaaaatgaaaataaagtttttttaatgg

SEQ ID NO: 69 - DNA, 536 bp, Homo sapien
  misc_feature (1)...(536): n = A,T,C or G
actagtccagtgtggtggaattccattgtgttgggggctctcaccctcctctcctgcagctccagctttgtgctctgcctctgaggagaccatggcccagcatctgagtaccctgctgctcctgctggccaccctagctgtggccctggcctggagccccaaggaggaggataggataatcccgggtggcatctataacgcagacctcaatgatgagtgggtacagcgtgcccttcacttcgccatcagcgagtataacaaggccaccaaagatgactactacagacgtccgctgcgggtactaagagccaggcaacagaccgttgggggggtgaattacttcttcgacgtagaggtgggccgaaccatatgtaccaagtcccagcccaacttggacacctgtgccttccatgaacagccagaactgcagaagaaacagttgtgctctttcgagatctacgaagttccctggggagaacagaangtccctgggtgaaatccaggtgtcaagaaatcctanggatctgttgccaggc

SEQ ID NO: 70 - DNA, 477 bp, Homo sapien
atgacccctaacaggggccctctcagccctcctaatgacctccggcctagccatgtgatttcacttccactccataacgctcctcatactaggcctactaaccaacacactaaccatataccaatgatggcgcgatgtaacacgagaaagcacataccaaggccaccacacaccacctgtccaaaaaggccttcgatacgggataatcctatttattacctcagaagtttttttcttcgcagggatttttctgagccttttaccactccagcctagcccctaccccccaactaggagggcactggcccccaacaggcatcaccccgctaaatcccctagaagtcccactcctaaacacatccgtattactcgcatcaggagtatcaatcacctgagctcaccatagtctaatagaaaacaaccgaaaccaaattattcaaagcactgcttattacaattttactgggtctctatttt

SEQ ID NO: 71 - DNA, 533 bp, Homo sapien
  misc_feature (1)...(533): n = A,T,C or G
agagctataggtacagtgtgatctcagctttgcaaacacattttctacatagatagtactaggtattaatagatatgtaaagaaagaaatcacaccattaataatggtaagattggtttatgtgattttagtggtatttttggcacccttatatatgttttccaaactttcagcagtgatattatttccataacttaaaaagtgagtttgaaaaagaaaatctccagcaagcatctcatttaaataaaggtttgtcatctttaaaaatacagcaatatgtgactttttaaaaaagctgtcaaataggtgtgaccctactaataattattagaaatacatttaaaaacatcgagtacctcaagtcagtttgccttgaaaaatatcaaatataactcttagagaaatgtacataaaagaatgcttcgtaattttggagtangaggttccctcctcaattttgtatttttaaaaagtacatggtaaaaaaaaaaattcacaacagtatataaggctgtaaaatgaagaattctgcc

SEQ ID NO: 72 - DNA, 511 bp, Homo sapien
  misc_feature (1)...(511): n = A,T,C or G
tattacggaaaaacacaccacataattcaactancaaagaanactgcttcagggcgtgtaaaatgaaaggcttccaggcagttatctgattaaagaacactaaaagagggacaaggctaaaagccgcaggatgtctacactatancaggcgctatttgggttggctggaggagctgtggaaaacatgganagattggtgctgganatcgccgtggctattcctcattgttattacanagtgaggttctctgtgtgcccactggtttgaaaaccgttctncaataatgatagaatagtacacacatgagaactgaaatggcccaaacccagaaagaaagcccaactagatcctcagaanacgcttctagggacaataaccgatgaagaaaagatggcctccttgtgcccccgtctgttatgatttctctccattgcagcnanaaacccgttcttctaagcaaacncaggtgatgatggcnaaaatacaccccctcttgaagnaccnggagga

SEQ ID NO: 73 - DNA, 499 bp, Homo sapien
  misc_feature (1)...(499): n = A,T,C or G
cagtgccagcactggtgccagtaccagtaccaataacagtgccagtgccagtgccagcaccagtggtggcttcagtgctggtgccagcctgaccgccactctcacatttgggctcttcgctggccttggtggagctggtgccagcaccagtggcagctctggtgcctgtggtttctcctacaagtgagattttagatattgttaatcctgccagtctttctcttcaagccagggtgcatcctcagaaacctactcaacacagcactctaggcagccactatcaatcaattgaagttgacactctgcattaaatctatttgccatttctgaaaaaaaaaaaaaaaaaagggcggccgctcgantctagagggcccgtttaaacccgctgatcagcctcgactgtgccttctanttgccagccatctgttgtttgcccctcccccgntgccttccttgaccctggaaagtgccactcccactgtcctttcctaantaaaat

SEQ ID NO: 74 - DNA, 537 bp, Homo sapien
  misc_feature (1)...(537): n = A,T,C or G
tttcataggagaacacactgaggagatacttgaagaatttggattcagccgcgaagagatttatcagcttaactcagataaaatcattgaaagtaataaggtaaaagctagtctctaacttccaggcccacggctcaagtgaatttgaatactgcatttacagtgtagagtaacacataacattgtatgcatggaaacatggaggaacagtattacagtgtcctaccactctaatcaagaaaagaattacagactctgattctacagtgatgattgaattctaaaaatggtaatcattagggcttttgatttataanactttgggtacttatactaaattatggtagttatactgccttccagtttgcttgatatatttgttgatattaagattcttgacttatattttgaatgggttctactgaaaaangaatgatatattcttgaagacatcgatatacatttatttacactcttgattctacaatgtagaaaatgaaggaaatgccccaaattgtatggtgataaaagtcccgt

SEQ ID NO: 75 - DNA, 467 bp, Homo sapien
  misc_feature (1)...(467): n = A,T,C or G
caaanacaattgttcaaaagatgcaaatgatacactactgctgcagctcacaaacacctctgcatattacacgtacctcctcctgctcctcaagtagtgtggtctattttgccatcatcacctgctgtctgcttagaagaacggctttctgctgcaanggagagaaatcataacagacggtggcacaaggaggccatcttttcctcatcggttattgtccctagaagcgtcttctgaggatctagttgggctttctttctgggtttgggccatttcanttctcatgtgtgtactattctatcattattgtataacggttttcaaaccngtgggcacncagagaacctcactctgtaataacaatgaggaatagccacggtgatctccagcaccaaatctctccatgttnttccagagctcctccagccaacccaaatagccgctgctatngtgtagaacatccctgn

SEQ ID NO: 76 - DNA, 400 bp, Homo sapien
  misc_feature (1)...(400): n = A,T,C or G
aagctgacagcattcgggccgagatgtctcgctccgtggccttagctgtgctcgcgctactctctctttctggcctggaggctatccagcgtactccaaagattcaggtttactcacgtcatccagcagagaatggaaagtcaaatttcctgaattgctatgtgtctgggtttcatccatccgacattgaagttgacttactgaagaatggagagagaattgaaaaagtggagcattcagacttgtctttcagcaaggactggtctttctatctcttgtactacactgaattcacccccactgaaaaagatgagtatgcctgccgtgtgaaccatgtgactttgtcacagcccaagatngttnagtgggatcganacatgtaagcagcancatgggaggt

SEQ ID NO: 77 - DNA, 248 bp, Homo sapien
ctggagtgccttggtgtttcaagcccctgcaggaagcagaatgcaccttctgaggcacctccagctgccccggcgggggatgcgaggctcggagcacccttgcccggctgtgattgctgccaggcactgttcatctcagcttttctgtccctttgctcccggcaagcgcttctgctgaaagttcatatctggagcctgatgtcttaacgaataaaggtcccatgctccacccgaaaaaaaaaaaaaaa

SEQ ID NO: 78 - DNA, 201 bp, Homo sapien
actagtccagtgtggtggaattccattgtgttgggcccaacacaatggctacctttaacatcacccagaccccgccctgcccgtgccccacgctgctgctaacgacagtatgatgcttactctgctactcggaaactatttttatgtaattaatgtatgctttcttgtttataaatgcctgatttaaaaaaaaaaaaaaaa

SEQ ID NO: 79 - DNA, 552 bp, Homo sapien
  misc_feature (1)...(552): n = A,T,C or G
tccttttgttaggtttttgagacaaccctagacctaaactgtgtcacagacttctgaatgtttaggcagtgctagtaatttcctcgtaatgattctgttattactttcctattctttattcctctttcttctgaagattaatgaagttgaaaattgaggtggataaatacaaaaaggtagtgtgatagtataagtatctaagtgcagatgaaagtgtgttatatatatccattcaaaattatgcaagttagtaattactcagggttaactaaattactttaatatgctgttgaacctactctgttccttggctagaaaaaattataaacaggactttgttagtttgggaagccaaattgataatattctatgttctaaaagttgggctatacataaantatnaagaaatatggaattttattcccaggaatatggggttcatttatgaatantacccggganagaagttttgantnaaaccngttttggttaatacgttaatatgtcctnaatnaacaaggcntgacttatttccaaaaaaaaaaaaaaaaa

SEQ ID NO: 80 - DNA, 476 bp, Homo sapien
  misc_feature (1)...(476): n = A,T,C or G
acagggatttgagatgctaaggccccagagatcgtttgatccaaccctcttattttcagaggggaaaatggggcctagaagttacagagcatctagctggtgcgctggcacccctggcctcacacagactcccgagtagctgggactacaggcacacagtcactgaagcaggccctgtttgcaattcacgttgccacctccaacttaaacattcttcatatgtgatgtccttagtcactaaggttaaactttcccacccagaaaaggcaacttagataaaatcttagagtactttcatactcttctaagtcctcttccagcctcactttgagtcctccttgggggttgataggaantntctcttggctttctcaataaaatctctatccatctcatgtttaatttggtacgcntaaaaatgctgaaaaaattaaaatgttctggtttcnctttaaaaaaaaaaaaaaaaaaaaaaa

SEQ ID NO: 81 - DNA, 232 bp, Homo sapien
  misc_feature (1)...(232): n = A,T,C or G
tttttttttgtatgccntcnctgtggngttattgttgctgccaccctggaggagcccagtttcttctgtatctttcttttctgggggatcttcctggctctgcccctccattcccagcctctcatccccatcttgcacttttgctagggttggaggcgctttcctggtagcccctcagagactcagtcagcgggaataagtcctaggggtggggggtgtggcaagccggcct

SEQ ID NO: 82 - DNA, 383 bp, Homo sapien
  misc_feature (1)...(383): n = A,T,C or G
aggcgggagcagaagctaaagccaaagcccaagaagagtggcagtgccagcactggtgccagtaccagtaccaataacatgccagtgccagtgccagcaccagtggtggcttcagtgctggtgccagcctgaccgccactctcacatttgggctcttcgctggccttggtggagctggtgccagcaccagtggcagctctggtgcctgtggtttctcctacaagtgagattttagatattgttaatcctgccagtctttctcttcaagccagggtgcatcctcagaaacctactcaacacagcactctnggcagccactatcaatcaattgaagttgacactctgcattaaatctatttgccatttcaaaaaaaaaaaaaaaa

SEQ ID NO: 83 - DNA, 494 bp, Homo sapien
  misc_feature (1)...(494): n = A,T,C or G
accgaattgggaccgctggcttataagcgatcatgtcctccagtattacctcaacgagcagggagatcgagtctatacgctgaagaaatttgacccgatgggacaacagacctgctcagcccatcctgctcggttctccccagatgacaaatactctcgacaccgaatcaccatcaagaaacgcttcaaggtgctcatgacccagcaaccgcgccctgtcctctgagggtccttaaactgatgtcttttctgccacctgttacccctcggagactccgtaaccaaactcttcggactgtgagccctgatgcctttttgccagccatactctttggcntccagtctctcgtggcgattgattatgcttgtgtgaggcaatcatggtggcatcacccatnaagggaacacatttganttttttttcncatattttaaattacnaccagaatanttcagaataaatgaattgaaaaactcttaaaaaaaaaaaaaaa

SEQ ID NO: 84 - DNA, 380 bp, Homo sapien
  misc_feature (1)...(380): n = A,T,C or G
gctggtagcctatggcgtggccacggangggctcctgaggcacgggacagtgacttcccaagtatcctgcgccgcgtcttctaccgtccctacctgcagatcttcgggcagattccccaggaggacatggacgtggccctcatggagcacagcaactgctcgtcggagcccggcttctgggcacaccctcctggggcccaggcgggcacctgcgtctcccagtatgccaactggctggtggtgctgctcctcgtcatcttcctgctcgtggccaacatcctgctggtcacttgctcattgccatgttcagttacacattcggcaaagtacagggcaacagcnatctctactgggaaggccagcgttnccgcctcatccgg

SEQ ID NO: 85 - DNA, 481 bp, Homo sapien
  misc_feature (1)...(481): n = A,T,C or G
gagttagctcctccacaaccttgatgaggtcgtctgcagtggcctctcgcttcataccgctnccatcgtcatactgtaggtttgccaccacctcctgcatcttggggcggctaatatccaggaaactctcaatcaagtcaccgtcnatnaaacctgtggctggttctgtcttccgctcggtgtgaaaggatctccagaaggagtgctcgatcttccccacacttttgatgactttattgagtcgattctgcatgtccagcaggaggttgtaccagctctctgacagtgaggtcaccagccctatcatgccnttgaacgtgccgaagaacaccgagccttgtgtggggggtgnagtctcacccagattctgcattaccaganagccgtggcaaaaganattgacaactcgcccaggnngaaaaagaacacctcctggaagtgctngccgctcctcgtccnttggtggnngcgcntncctttt

SEQ ID NO: 86 - DNA, 472 bp, Homo sapien
  misc_feature (1)...(472): n = A,T,C or G
aacatcttcctgtataatgctgtgtaatatcgatccgatnttgtctgctgagaattcattacttggaaaagcaacttnaagcctggacactggtattaaaattcacaatatgcaacactttaaacagtgtgtcaatctgctcccttactttgtcatcaccagtctgggaataagggtatgccctattcacacctgttaaaagggcgctaagcatttttgattcaacatctttttttttgacacaagtccgaaaaaagcaaaagtaaacagttnttaatttgttagccaattcactttcttcatgggacagagccatttgatttaaaaagcaaattgcataatattgagctttgggagctgatatntgagcggaagantagcctttctacttcaccagacacaactcctttcatattgggatgttnacnaaagttatgtctcttacagatgggatgcttttgtggcaattctg

SEQ ID NO: 87 - DNA, 413 bp, Homo sapien
  misc_feature (1)...(413): n = A,T,C or G
agaaaccagtatctctnaaaacaacctctcataccttgtggacctaattttgtgtgcgtgtgtgtgtgcgcgcatattatatagacaggcacatcttttttacttttgtaaaagcttatgcctctttggtatctatatctgtgaaagttttaatgatctgccataatgtcttggggacctttgtcttctgtgtaaatggtactagagaaaacacctatnttatgagtcaatctagttngttttattcgacatgaaggaaatttccagatnacaacactnacaaactctcccttgactaggggggacaaagaaaagcanaactgaacatnagaaacaattncctggtgagaaattncataaacagaaattgggtngtatattgaaananngcatcattnaaacgtttttttttt

SEQ ID NO: 88 - DNA, 448 bp, Homo sapien
  misc_feature (1)...(448): n = A,T,C or G
cgcagcgggtcctctctatctagctccagcctctcgcctgccccactccccgcgtcccgcgtcctagccnaccatggccgggcccctgcgcgccccgctgctcctgctggccatcctggccgtggccctggccgtgagccccgcggccggctccagtcccggcaagccgccgcgcctggtgggaggcccatggaccccgcgtggaagaagaaggtgtgcggcgtgcactggactttgccgtcggcnantacaacaaacccgcaacnacttttaccnagcncgcgctgcaggttgtgccgccccaancaaattgttactnggggtaantaattcttggaagttgaacctgggccaaacnngtttaccagaaccnagccaattngaacaattncccctccataacagccccttttaaaaagggaancantcctgntcttttccaaatttt

SEQ ID NO: 89 - DNA, 463 bp, Homo sapien
  misc_feature (1)...(463): n = A,T,C or G
gaattttgtgcactggccactgtgatggaaccattgggccaggatgctttgagtttatcagtagtgattctgccaaagttggtgttgtaacatgagtatgtaaaatgtcaaaaaattagcagaggtctaggtctgcatatcagcagacagtttgtccgtgtattttgtagccttgaagttctcagtgacaagttnnttctgatgcgaagttctnattccagtgttttagtcctttgcatctttnatgttnagacttgcctctntnaaattgcttttgtnttctgcaggtactatctgtggtttaacaaaatagaannacttctctgcttngaanatttgaatatcttacatctnaaaatnaattctctccccatannaaaacccangcccttggganaatttgaaaaanggntccttcnnaattcnnanaanttcagntntcatacaacanaacnggancccc

SEQ ID NO: 90 - DNA, 400 bp, Homo sapien
  misc_feature (1)...(400): n = A,T,C or G
agggattgaaggtctnttntactgtcggactgttcanccaccaactctacaagttgctgtcttccactcactgtctgtaagcntnttaacccagactgtatcttcataaatagaacaaattcttcaccagtcacatcttctaggacctttttggattcagttagtataagctcttccacttcctttgttaagacttcatctggtaaagtcttaagttttgtagaaaggaatttaattgctcgttctctaacaatgtcctctccttgaagtatttggctgaacaacccacctnaagtccctttgtgcatccattttaaatatacttaatagggcattggtncactaggttaaattctgcaagagtcatctgtctgcaaaagttgcgttagtatatctgcca

SEQ ID NO: 91 - DNA, 480 bp, Homo sapien
  misc_feature (1)...(480): n = A,T,C or G
gagctcggatccaataatctttgtctgagggcagcacacatatncagtgccatggnaactggtctaccccacatgggagcagcatgccgtagntatataaggtcattccctgagtcagacatgcctctttgactaccgtgtgccagtgctggtgattctcacacacctccnnccgctctttgtggaaaaactggcacttgnctggaactagcaagacatcacttacaaattcacccacgagacacttgaaaggtgtaacaaagcgactcttgcattgctttttgtccctccggcaccagttgtcaatactaacccgctggtttgcctccatcacatttgtgatctgtagctctggatacatctcctgacagtactgaagaacttcttcttttgtttcaaaagcaactcttggtgcctgttngatcaggttcccatttcccagtccgaatgttcacatggcatatnttacttcccacaaaa

SEQ ID NO: 92 - DNA, 477 bp, Homo sapien
  misc_feature (1)...(477): n = A,T,C or G
atacagcccanatcccaccacgaagatgcgcttgttgactgagaacctgatgcggtcactggtcccgctgtagccccagcgactctccacctgctggaagcggttgatgctgcactccttcccacgcaggcagcagcggggccggtcaatgaactccactcgtggcttggggttgacggttaantgcaggaagaggctgaccacctcgcggtccaccaggatgcccgactgtgcgggacctgcagcgaaactcctcgatggtcatgagcgggaagcgaatgangcccagggccttgcccagaaccttccgcctgttctctggcgtcacctgcagctgctgccgctnacactcggcctcggaccagcggacaaacggcgttgaacagccgcacctcacggatgcccantgtgtcgcgctccaggaacggcnccagcgtgtccaggtcaatgtcggtgaancctccgcgggtaatggcg

SEQ ID NO: 93 - DNA, 377 bp, Homo sapien
  misc_feature (1)...(377): n = A,T,C or G
gaacggctggaccttgcctcgcattgtgctgctggcaggaataccttggcaagcagctccagtccgagcagccccagaccgctgccgcccgaagctaagcctgcctctggccttcccctccgcctcaatgcagaaccantagtgggagcactgtgtttagagttaagagtgaacactgtntgattttacttgggaatttcctctgttatatagcttttcccaatgctaatttccaaacaacaacaacaaaataacatgtttgcctgttnagttgtataaaagtangtgattctgtatntaaagaaaatattactgttacatatactgcttgcaanttctgtatttattggtnctctggaaataaatatattattaaa

SEQ ID NO: 94 - DNA, 495 bp, Homo sapien
  misc_feature (1)...(495): n = A,T,C or G
ccctttgaggggttagggtccagttcccagtggaagaaacaggccaggagaantgcgtgccgagctgangcagatttcccacagtgaccccagagccctgggctatagtctctgacccctccaaggaaagaccaccttctggggacatgggctggagggcaggacctagaggcaccaagggaaggccccattccggggctgttccccgaggaggaagggaaggggctctgtgtgccccccacgaggaanaggccctgantcctgggatcanacaccccttcacgtgtatccccacacaaatgcaagctcaccaaggtcccctctcagtcccttccctacaccctgaacggncactggcccacacccacccagancanccacccgccatggggaatgtnctcaaggaatcgcngggcaacgtggactctngtcccnnaagggggcagaatctccaatagangganngaacccttgctnanaaaaaaaaanaaaaaa

SEQ ID NO: 95 - DNA, 472 bp, Homo sapien
  misc_feature (1)...(472): n = A,T,C or G
ggttacttggtttcattgccaccacttagtggatgtcatttagaaccattttgtctgctccctctggaagccttgcgcagagcggactttgtaattgttggagaataactgctgaatttttagctgttttgagttgattcgcaccactgcaccacaactcaatatgaaaactatttnacttatttattatcttgtgaaaagtatacaatgaaaattttgttcatactgtatttatcaagtatgatgaaaagcaatagatatatattcttttattatgttnaattatgattgccattattaatcggcaaaatgtggagtgtatgttcttttcacagtaatatatgccttttgtaacttcacttggttattttattgtaaatgaattacaaaattcttaatttaagaaaatggtangttatatttanttcantaatttctttccttgtttacgttaattttgaaaagaatgcat

SEQ ID NO: 96 - DNA, 476 bp, Homo sapien
  misc_feature (1)...(476): n = A,T,C or G
ctgaagcatttcttcaaacttntctacttttgtcattgatacctgtagtaagttgacaatgtggtgaaatttcaaaattatatgtaacttctactagttttactttctcccccaagtcttttttaactcatgatttttacacacacaatccagaacttattatatagcctctaagtctttattcttcacagtagatgatgaaagagtcctccagtgtcttgngcanaatgttctagntatagctggatacatacngtgggagttctataaactcatacctcagtgggactnaaccaaaattgtgttagtctcaattcctaccacactgagggagcctcccaaatcactatattcttatctgcaggtactcctccagaaaaacngacagggcaggcttgcatgaaaaagtnacatctgcgttacaaagtctatcttcctcanangtctgtnaaggaacaatttaatcttctagcttt

SEQ ID NO: 97 - DNA, 479 bp, Homo sapien
  misc_feature (1)...(479): n = A,T,C or G
actctttctaatgctgatatgatcttgagtataagaatgcatatgtcactagaatggataaaataatgctgcaaacttaatgttcttatgcaaaatggaacgctaatgaaacacagcttacaatcgcaaatcaaaactcacaagtgctcatctgttgtagatttagtgtaataagacttagattgtgctccttcggatatgattgtttctcanatcttgggcaatnttccttagtcaaatcaggctactagaattctgttattggatatntgagagcatgaaatttttaanaatacacttgtgattatnaaattaatcacaaatttcacttatacctgctatcagcagctagaaaaacatntnntttttanatcaaagtattttgtgtttggaantgtnnaaatgaaatctgaatgtgggttcnatcttattttttcccngacnactanttncttttttagggnctattctganccatc

SEQ ID NO: 98 - DNA, 461 bp, Homo sapien
agtgacttgtcctccaacaaaaccccttgatcaagtttgtggcactgacaatcagacctatgctagttcctgtcatctattcgctactaaatgcagactggaggggaccaaaaaggggcatcaactccagctggattattttggagcctgcaaatctattcctacttgtacggactttgaagtgattcagtttcctctacggatgagagactggctcaagaatatcctcatgcagctttatgaagccactctgaacacgctggttatctagatgagaacagagaaataaagtcagaaaatttacctggagaaaagaggctttggctggggaccatcccattgaaccttctcttaaggactttaagaaaaactaccacatgttgtgtatcctggtgccggccgtttatgaactgaccaccctttggaataatcttgacgctcctgaacttgctcctctgcga

SEQ ID NO: 99 - DNA, 171 bp, Homo sapien
gtggccgcgcgcaggtgtttcctcgtaccgcagggccccctcccttccccaggcgtccctcggcgcctctgcgggcccgaggaggagcggctggcgggtggggggagtgtgacccaccctcggtgagaaaagccttctctagcgatctgagaggcgtgccttgggggtacc

SEQ ID NO: 100 - DNA, 269 bp, Homo sapien
cggccgcaagtgcaactccagctggggccgtgcggacgaagattctgccagcagttggtccgactgcgacgacggcggcggcgacagtcgcaggtgcagcgcgggcgcctggggtcttgcaaggctgagctgacgccgcagaggtcgtgtcacgtcccacgaccttgacgccgtcggggacagccggaacagagcccggtgaagcgggaggcctcggggagcccctcgggaagggcggcccgagagatacgcaggtgcaggtggccgcc

SEQ ID NO: 101 - DNA, 405 bp, Homo sapien
ttttttttttttttggaatctactgcgagcacagcaggtcagcaacaagtttattttgcagctagcaaggtaacagggtagggcatggttacatgttcaggtcaacttcctttgtcgtggttgattggtttgtctttatgggggcggggtggggtaggggaaacgaagcaaataacatggagtgggtgcaccctccctgtagaacctggttacaaagcttggggcagttcacctggtctgtgaccgtcattttcttgacatcaatgttattagaagtcaggatatcttttagagagtccactgttctggagggagattagggtttcttgccaaatccaacaaaatccactgaaaaagttggatgatcagtacgaataccgaggcatattctcatatcggtggcca

SEQ ID NO: 102 - DNA, 470 bp, Homo sapien
ttttttttttttttttttttttttttttttttttttttttttttttttttttttttttttggcacttaatccatttttatttcaaaatgtctacaaatttaatcccattatacggtattttcaaaatctaaattattcaaattagccaaatccttaccaaataatacccaaaaatcaaaaatatacttctttcagcaaacttgttacataaattaaaaaaatatatacggctggtgttttcaaagtacaattatcttaacactgcaaacattttaaggaactaaaataaaaaaaaacactccgcaaaggttaaagggaacaacaaattcttttacaacaccattataaaaatcatatctcaaatcttaggggaatatatacttcacacgggatcttaacttttactcactttgtttatttttttaaaccattgtttgggcccaacacaatggaatcccccctggactagt

SEQ ID NO: 103 - DNA, 581 bp, Homo sapien
ttttttttttttttttttgacccccctcttataaaaaacaagttaccattttattttacttacacatatttattttataattggtattagatattcaaaaggcagcttttaaaatcaaactaaatggaaactgccttagatacataattcttaggaattagcttaaaatctgcctaaagtgaaaatcttctctagctcttttgactgtaaatttttgactcttgtaaaacatccaaattcatttttcttgtctttaaaattatctaatctttccattttttccctattccaagtcaatttgcttctctagcctcatttcctagctcttatctactattagtaagtggcttttttcctaaaagggaaaacaggaagagaaatggcacacaaaacaaacattttatattcatatttctacctacgttaataaaatagcattttgtgaagccagctcaaaagaaggcttagatccttttatgtccattttagtcactaaacgatatcaaagtgccagaatgcaaaaggtttgtgaacatttattcaaaagctaatataagatatttcacatactcatctttctg

SEQ ID NO: 104 - DNA, 578 bp, Homo sapien
tttttttttttttttttttttttttctcttctttttttttgaaatgaggatcgagtttttcactctctagatagggcatgaagaaaactcatctttccagctttaaaataacaatcaaatctcttatgctatatcatattttaagttaaactaatgagtcactggcttatcttctcctgaaggaaatctgttcattcttctcattcatatagttatatcaagtactaccttgcatattgagaggtttttcttctctatttacacatatatttccatgtgaatttgtatcaaacctttattttcatgcaaactagaaaataatgtttcttttgcataagagaagagaacaatatagcattacaaaactgctcaaattgtttgttaagttatccattataattagttggcaggagctaatacaaatcacatttacgacagcaataataaaactgaagtaccagttaaatatccaaaataattaaaggaacatttttagcctgggtataattagctaattcactttacaagcatttattagaatgaattcacatgttattattcctagcccaacacaatgg

SEQ ID NO: 105 - DNA, 538 bp, Homo sapien
tttttttttttttttcagtaataatcagaacaatatttatttttatatttaaaattcatagaaaagtgccttacatttaataaaagtttgtttctcaaagtgatcagaggaattagatatgtcttgaacaccaatattaatttgaggaaaatacaccaaaatacattaagtaaattatttaagatcatagagcttgtaagtgaaaagataaaatttgacctcagaaactctgagcattaaaaatccactattagcaaataaattactatggacttcttgctttaattttgtgatgaatatggggtgtcactggtaaaccaacacattctgaaggatacattacttagtgatagattcttatgtactttgctaatacgtggatatgagttgacaagtttctctttcttcaatcttttaaggggcgagaaatgaggaagaaaagaaaaggattacgcatactgttctttctatggaaggattagatatgtttcctttgccaatattaaaaaaataataatgtttactactagtgaaaccc

SEQ ID NO: 106 - DNA, 473 bp, Homo sapien
ttttttttttttttttagtcaagtttctatttttattataattaaagtcttggtcatttcatttattagctctgcaacttacatatttaaattaaagaaacgttttagacaactgtacaatttataaatgtaaggtgccattattgagtaatatattcctccaagagtggatgtgtcccttctcccaccaactaatgaacagcaacattagtttaattttattagtagatatacactgctgcaaacgctaattctcttctccatccccatgtgatattgtgtatatgtgtgagttggtagaatgcatcacaatctacaatcaacagcaagatgaagctaggctgggctttcggtgaaaatagactgtgtctgtctgaatcaaatgatctgacctatcctcggtggcaagaactcttcgaaccgcttcctcaaaggcgctgccacatttgtggctctttgcacttgtttcaaaa

SEQ ID NO: 107 - DNA, 1621 bp, Homo sapien
cgccatggcactgcagggcatctcggtcatggagctgtccggcctggccccgggcccgttctgtgctatggtcctggctgacttcggggcgcgtgtggtacgcgtggaccggcccggctcccgctacgacgtgagccgcttgggccggggcaagcgctcgctagtgctggacctgaagcagccgcggggagccgccgtgctgcggcgtctgtgcaagcggtcggatgtgctgctggagcccttccgccgcggtgtcatggagaaactccagctgggcccagagattctgcagcgggaaaatccaaggcttatttatgccaggctgagtggatttggccagtcaggaagcttctgccggttagctggccacgatatcaactatttggctttgtcaggtgttctctcaaaaattggcagaagtggtgagaatccgtatgccccgctgaatctcctggctgactttgctggtggtggccttatgtgtgcactgggcattataatggctctttttgaccgcacacgcactgacaagggtcaggtcattgatgcaaatatggtggaaggaacagcatatttaagttcttttctgtggaaaactcagaaatcgagtctgtgggaagcacctcgaggacagaacatgttggatggtggagcacctttctatacgacttacaggacagcagatggggaattcatggctgttggagcaatagaaccccagttctacgagctgctgatcaaaggacttggactaaagtctgatgaacttcccaatcagatgagcatggatgattggccagaaatgaagaagaagtttgcagatgtatttgcaaagaagacgaaggcagagtggtgtcaaatctttgacggcacagatgcctgtgtgactccggttctgacttttgaggaggttgttcatcatgatcacaacaaggaacggggctcgtttatcaccagtgaggagcaggacgtgagcccccgccctgcacctctgctgttaaacaccccagccatcccttctttcaaaagggatcctttcataggagaacacactgaggagatacttgaagaatttggattcagccgcgaagagatttatcagcttaactcagataaaatcattgaaagtaataaggtaaaagctagtctctaacttccaggcccacggctcaagtgaatttgaatactgcatttacagtgtagagtaacacataacattgtatgcatggaaacatggaggaacagtattacagtgtcctaccactctaatcaagaaaagaattacagactctgattctacagtgatgattgaattctaaaaatggttatcattagggcttttgatttataaaactttgggtacttatactaaattatggtagttattctgccttccagtttgcttgatatatttgttgatattaagattcttgacttatattttgaatgggttctagtgaaaaaggaatgatatattcttgaagacatcgatatacatttatttacactcttgattctacaatgtagaaaatgaggaaatgccacaaattgtatggtgataaaagtcacgtgaaacaaaaaaaaaaaaaaaaaaaaaaaaaaaaaaaaaaaaaaaaaaaaa

SEQ ID NO: 108 - protein, 382 aa, Homo sapien [sequence omitted]

SEQ ID NO: 109 - DNA, 1524 bp, Homo sapien
ggcacgaggctgcgccagggcctgagcggaggcgggggcagcctcgccagcgggggccccgggcctggccatgcctcactgagccagcgcctgcgcctctacctcgccgacagctggaaccagtgcgacctagtggctctcacctgcttcctcctgggcgtgggctgccggctgaccccgggtttgtaccacctgggccgcactgtcctctgcatcgacttcatggttttcacggtgcggctgcttcacatcttcacggtcaacaaacagctggggcccaagatcgtcatcgtgagcaagatgatgaaggacgtgttcttcttcctcttcttcctcggcgtgtggctggtagcctatggcgtggccacggaggggctcctgaggccacgggacagtgacttcccaagtatcctgcgccgcgtcttctaccgtccctacctgcagatcttcgggcagattccccaggaggacatggacgtggccctcatggagcacagcaactgctcgtcggagcccggcttctgggcacaccctcctggggcccaggcgggcacctgcgtctcccagtatgccaactggctggtggtgctgctcctcgtcatcttcctgctcgtggccaacatcctgctggtcaacttgctcattgccatgttcagttacacattcggcaaagtacagggcaacagcgatctctactggaaggcgcagcgttaccgcctcatccgggaattccactctcggcccgcgctggccccgccctttatcgtcatctcccacttgcgcctcctgctcaggcaattgtgcaggcgaccccggagcccccagccgtcctccccggccctcgagcatttccgggtttacctttctaaggaagccgagcggaagctgctaacgtgggaatcggtgcataaggagaactttctgctggcacgcgctagggacaagcgggagagcgactccgagcgtctgaagcgcacgtcccagaaggtggacttggcactgaaacagctgggacacatccgcgagtacgaacagcgcctgaaagtgctggagcgggaggtccagcagtgtagccgcgtcctggggtgggtggccgaggccctgagccgctctgccttgctgcccccaggtgggccgccaccccctgacctgcctgggtccaaagactgagccctgctggcggacttcaaggagaagcccccacaggggattttgctcctagagtaaggctcatctgggcctcggcccccgcacctggtggccttgtccttgaggtgagccccatgtccatctgggccactgtcaggaccacctttgggagtgtcatccttacaaaccacagcatgcccggctcctcccagaaccagtcccagcctgggaggatcaaggcctggatcccgggccgttatccatctggaggctgcagggtccttggggtaacagggaccacagacccctcaccactcacagattcctcacactggggaaataaagccatttcagaggaaaaaaaaaaaaaaaaaa

SEQ ID NO: 110 - DNA, 3410 bp, Homo sapien
gggaaccagcctgcacgcgctggctccgggtgacagccgcgcgcctcggccaggatctgagtgatgagacgtgtccccactgaggtgccccacagcagcaggtgttgagcatgggctgagaagctggaccggcaccaaagggctggcagaaatgggcgcctggctgattcctaggcagttggcggcagcaaggaggagaggccgcagcttctggagcagagccgagacgaagcagttctggagtgcctgaacggccccctgagccctacccgcctggcccactatggtccagaggctgtgggtgagccgcctgctgcggcaccggaaagcccagctcttgctggtcaacctgctaacctttggcctggaggtgtgtttggccgcaggcatcacctatgtgccgcctctgctgctggaagtgggggtagaggagaagttcatgaccatggtgctgggcattggtccagtgctgggcctggtctgtgtcccgctcctaggctcagccagtgaccactggcgtggacgctatggccgccgccggcccttcatctgggcactgtccttgggcatcctgctgagcctctttctcatcccaagggccggctggctagcagggctgctgtgcccggatcccaggcccctggagctggcactgctcatcctgggcgtggggctgctggacttctgtggccaggtgtgcttcactccactggaggccctgctctctgacctcttccgggacccggaccactgtcgccaggcctactctgtctatgccttcatgatcagtcttgggggctgcctgggctacctcctgcctgccattgactgggacaccagtgccctggccccctacctgggcacccaggaggagtgcctctttggcctgctcaccctcatcttcctcacctgcgtagcagccacactgctggtggctgaggaggcagcgctgggccccaccgagccagcagaagggctgtcggccccctccttgtcgccccactgctgtccatgccgggcccgcttggctttccggaacctgggcgccctgcttccccggctgcaccagctgtgctgccgcatgccccgcaccctgcgccggctcttcgtggctgagctgtgcagctggatggcactcatgaccttcacgctgttttacacggatttcgtgggcgaggggctgtaccagggcgtgcccagagctgagccgggcaccgaggcccggagacactatgatgaaggcgttcggatgggcagcctggggctgttcctgcagtgcgccatctccctggtcttctctctggtcatggaccggctggtgcagcgattcggcactcgagcagtctatttggccagtgtggcagctttccctgtggctgccggtgccacatgcctgtcccacagtgtggccgtggtgacagcttcagccgccctcaccgggttcaccttctcagccctgcagatcctgccctacacactggcctccctctaccaccgggagaagcaggtgttcctgcccaaataccgaggggacactggaggtgctagcagtgaggacagcctgatgaccagcttcctgccaggccctaagcctggagctcccttccctaatggacacgtgggtgctggaggcagtggcctgctcccacctccacccgcgctctgcggggcctctgcctgtgatgtctccgtacgtgtggtggtgggtgagcccaccgaggccagggtggttccgggccggggcatctgcctggacctcgccatcctggatagtgccttcctgctgtcccaggtggccccatccctgtttatgggctccattgtccagctcagccagtctgtcactgcctatatggtgtctgccgcaggcctgggtctggtcgccatttactttgctacacaggtagtatttgacaagagcgacttggccaaatactcagcgtagaaaacttccagcacattggggtggagggcctgcctcactgggtcccagctccccgctcctgttagccccatggggctgccgggctggccgccagtttctgttgctgccaaagtaatgtggctctctgctgccaccctgtgctgctgaggtgcgtagctgcacagctgggggctggggcgtccctctcctctctccccagtctctagggctgcctgactggaggccttccaagggggtttcagtctggacttatacagggaggccagaagggctccatgcactggaatgcggggactctgcaggtggattacccaggctcagggttaacagctagcctcctagttgagacacacctagagaagggtttttgggagctgaataaactcagtcacctggtttcccatctctaagccccttaacctgcagcttcgtttaatgtagctcttgcatgggagtttctaggatgaaacactcctccatgggatttgaacatatgacttatttgtaggggaagagtcctgaggggcaacacacaagaaccaggtcccctcagcccacagcactgtctttttgctgatccacccccctcttaccttttatcaggatgtggcctgttggtccttctgttgccatcacagagacacaggcatttaaatatttaacttatttatttaacaaagtagaagggaatccattgctagcttttctgtgttggtgtctaatatttgggtagggtgggggatccccaacaatcaggtcccctgagatagctggtcattgggctgatcattgccagaatcttcttctcctggggtctggccccccaaaatgcctaacccaggaccttggaaattctactcatcccaaatgataattccaaatgctgttacccaaggttagggtgttgaaggaaggtagagggtggggcttcaggtctcaacggcttccctaaccacccctcttctcttggcccagcctggttccccccacttccactcccctctactctctctaggactgggctgatgaaggcactgcccaaaatttcccctacccccaactttcccctacccccaactttccccaccagctccacaaccctgtttggagctactgcaggaccagaagcacaaagtgcggtttcccaagcctttgtccatctcagcccccagagtatatctgtgcttggggaatctcacacagaaactcaggagcaccccctgcctgagctaagggaggtcttatctctcagggggggtttaagtgccgtttgcaataatgtcgtcttatttatttagcggggtgaatattttatactgtaagtgagcaatcagagtataatgtttatggtgacaaaattaaaggctttcttatatgtttaaaaaaaaaaaaaaaaaaaaaaaaaaaaaaaaaaaaaaaaaaaraaaaaaaaaaaaaaaaaaaaaaaaaaaataaaaaaaaaaaa

SEQ ID NO: 111 - DNA, 1289 bp, Homo sapien
agccaggcgtccctctgcctgcccactcagtggcaacacccgggagctgttttgtcctttgtggagcctcagcagttccctctttcagaactcactgccaagagccctgaacaggagccaccatgcagtgcttcagcttcattaagaccatgatgatcctcttcaatttgctcatctttctgtgtggtgcagccctgttggcagtgggcatctgggtgtcaatcgatggggcatcctttctgaagatcttcgggccactgtcgtccagtgccatgcagtttgtcaacgtgggctacttcctcatcgcagccggcgttgtggtctttgctcttggtttcctgggctgctatggtgctaagactgagagcaagtgtgccctcgtgacgttcttcttcatcctcctcctcatcttcattgctgaggttgcagctgctgtggtcgccttggtgtacaccacaatggctgagcacttcctgacgttgctggtagtgcctgccatcaagaaagattatggttcccaggaagacttcactcaagtgtggaacaccaccatgaaagggctcaagtgctgtggcttcaccaactatacggattttgaggactcaccctacttcaaagagaacagtgcctttcccccattctgttgcaatgacaacgtcaccaacacagccaatgaaacctgcaccaagcaaaaggctcacgaccaaaaagtagagggttgcttcaatcagcttttgtatgacatccgaactaatgcagtcaccgtgggtggtgtggcagctggaattgggggcctcgagctggctgccatgattgtgtccatgtatctgtactgcaatctacaataagtccacttctgcctctgccactactgctgccacatgggaactgtgaagaggcaccctggcaagcagcagtgattgggggaggggacaggatctaacaatgtcacttgggccagaatggacctgccctttctgctccagacttggggctagatagggaccactccttttagcgatgcctgactttccttccattggtgggtggatgggtggggggcattccagagcctctaaggtagccagttctgttgcccattcccccagtctattaaacccttgatatgccccctaggcctagtggtgatcccagtgctctactgggggatgagagaaaggcattttatagcctgggcataagtgaaatcagcagagcctctgggtggatgtgtagaaggcacttcaaaatgcataaacctgttacaatgttaaaaaaaaaaaaaaaaa

SEQ ID NO: 112 - protein, 315 aa, Homo sapien
MVFTVRLLHIFTVNKQLGPKIVIVSKMMKDVFFFLFFLGVWLVAYGVATEGLLRPRDSDFPSILRRVFYRPYLQIFGQIPQEDMDVALMEHSNCSSEPGFWAHPPGAQAGTCVSQYANWLVVLLLVIFLLVANILLVNLLIAMFSYTFGKVQGNSDLYWKAQRYRLIREFHSRPALAPPFIVISHLRLLLRQLCRRPRSPQPSSPALEHFRVYLSKEAERKLLTWESVHKENFLLARARDKRESDSERLKRTSQKVDLALKQLGHIREYEQRLKVLEREVQQCSRVLGWVAEALSRSALLPPGGPPPPDLPGSKD

SEQ ID NO: 113 - protein, 553 aa, Homo sapien
MVQRLWVSRLLRHRKAQLLLVNLLTFGLEVCLAAGITYVPPLLLEVGVEEKFMTMVLGIGPVLGLVCVPLLGSASDHWRGRYGRRRPFIWALSLGILLSLFLIPRAGWLAGLLCPDPRPLELALLILGVGLLDFCGQVCFTPLEALLSDLFRDPDHCRQAYSVYAFMISLGGCLGYLLPAIDWDTSALAPYLGTQEECLFGLLTLIFLTCVAATLLVAEEAALGPTEPAEGLSAPSLSPHCCPCRARLAFRNLGALLPRLHQLCCRMPRTLRRLFVAELCSWMALMTFTLFYTDFVGEGLYQGVPRAEPGTEARRHYDEGVRMGSLGLFLQCAISLVFSLVMDRLVQRFGTRAVYLASVAAFPVAAGATCLSHSVAVVTASAALTGFTFSALQILPYTLASLYHREKQVFLPKYRGDTGGASSEDSLMTSFLPGPKPGAPFPNGHVGAGGSGLLPPPPALCGASACDVSVRVVVGEPTEARVVPGRGICLDLAILDSAFLLSQVAPSLFMGSIVQLSQSVTAYMVSAAGLGLVAIYFATQVVFDKSDLAKYSA

SEQ ID NO: 114 - protein, 241 aa, Homo sapien
MQCFSFIKTMMILFNLLIFLCGAALLAVGIWVSIDGASFLKIFGPLSSSAMQFVNVGYFLIAAGVVVFALGFLGCYGAKTESKCALVTFFFILLLIFIAEVAAAVVALVYTTMAEHFLTLLVVPAIKKDYGSQEDFTQVWNTTMKGLKCCGFTNYTDFEDSPYFKENSAFPPFCCNDNVTNTANETCTKQKAHDQKVEGCFNQLLYDIRTNAVTVGGVAAGIGGLELAAMIVSMYLYCNLQ

SEQ ID NO: 115 - DNA, 366 bp, Homo sapien
gctctttctctcccctcctctgaatttaattctttcaacttgcaatttgcaaggattacacatttcactgtgatgtatattgtgttgcaaaaaaaaaaaagtgtctttgtttaaaattacttggtttgtgaatccatcttgctttttccccattggaactagtcattaacccatctctgaactggtagaaaaacatctgaagagctagtctatcagcatctgacaggtgaattggatggttctcagaaccatttcacccagacagcctgtttctatcctgtttaataaattagtttgggttctctacatgcataacaaaccctgctccaatctgtcacataaaagtctgtgacttgaagtttagtc

SEQ ID NO: 116 - DNA, 282 bp, Homo sapien
  misc_feature (1)...(282): n = A,T,C or G
acaaagatgaaccatttcctatattatagcaaaattaaaatctacccgtattctaatattgagaaatgagatnaaacacaatnttataaagtctacttagagaagatcaagtgacctcaaagactttactattttcatattttaagacacatgatttatcctattttagtaacctggttcatacgttaaacaaaggataatgtgaacagcagagaggatttgttggcagaaaatctatgttcaatctngaactatctanatcacagacatttctattccttt

SEQ ID NO: 117 - DNA, 305 bp, Homo sapien
  misc_feature (1)...(305): n = A,T,C or G
acacatgtcgcttcactgccttcttagatgcttctggtcaacatanaggaacagggaccatatttatcctccctcctgaaacaattgcaaaataanacaaaatatatgaaacaattgcaaaataaggcaaaatatatgaaacaacaggtctcgagatattggaaatcagtcaatgaaggatactgatccctgatcactgtcctaatgcaggatgtgggaaacagatgaggtcacctctgtgactgccccagcttactgcctgtagagagtttctangctgcagttcagacagggagaaattgggt

SEQ ID NO: 118 - DNA, 71 bp, Homo sapien
  misc_feature (1)...(71): n = A,T,C or G
accaaggtgtntgaatctctgacgtggggatctctgattcccgcacaatctgagtggaaaaantcctgggt

SEQ ID NO: 119 - DNA, 212 bp, Homo sapien
  misc_feature (1)...(212): n = A,T,C or G
actccggttggtgtcagcagcacgtggcattgaacatngcaatgtggagcccaaaccacagaaaatggggtgaaattggccaactttctatnaacttatgttggcaantttgccaccaacagtaagctggcccttctaataaaagaaaattgaaaggtttctcactaancggaattaantaatggantcaaganactcccaggcctcagcgt

SEQ ID NO: 120 - DNA, 90 bp, Homo sapien
  misc_feature (1)...(90): n = A,T,C or G
actcgttgcanatcaggggccccccagagtcaccgttgcaggagtccttctggtcttgccctccgccggcgcagaacatgctggggtggt

SEQ ID NO: 121 - DNA, 218 bp, Homo sapien
  misc_feature (1)...(218): n = A,T,C or G
tgtancgtgaanacgacaganagggttgtcaaaaatggagaanccttgaagtcattttgagaataagatttgctaaaagatttggggctaaaacatggttattgggagacatttctgaagatatncangtaaattanggaatgaattcatggttcttttgggaattcctttacgatngccagcatanacttcatgtggggatancagctacccttgta

SEQ ID NO: 122 - DNA, 171 bp, Homo sapien
taggggtgtatgcaactgtaaggacaaaaattgagactcaactggcttaaccaataaaggcatttgttagctcatggaacaggaagtcggatggtggggcatcttcagtgctgcatgagtcaccaccccggcggggtcatctgtgccacaggtccctgttgacagtgcggt

SEQ ID NO: 123 - DNA, 76 bp, Homo sapien
  misc_feature (1)...(76): n = A,T,C or G
tgtagcgtgaagacnacagaatggtgtgtgctgtgctatccaggaacacatttattatcattatcaantattgtgt

SEQ ID NO: 124 - DNA, 131 bp, Homo sapien
acctttccccaaggccaatgtcctgtgtgctaactggccggctgcaggacagctgcaattcaatgtgctgggtcatatggaggggaggagactctaaaatagccaattttattctcttggttaagatttgt

SEQ ID NO: 125 - DNA, 432 bp, Homo sapien
actttatctactggctatgaaatagatggtggaaaattgcgttaccaactataccactggcttgaaaaagaggtgatagctcttcagaggacttgtgacttttgctcagatgctgaagaactacagtctgcatttggcagaaatgaagatgaatttggattaaatgaggatgctgaagatttgcctcaccaaacaaaagtgaaacaactgagagaaaattttcaggaaaaaagacagtggctcttgaagtatcagtcacttttgagaatgtttcttagttactgcatacttcatggatcccatggtgggggtcttgcatctgtaagaatggaattgattttgcttttgcaagaatctcagcaggaaacatcagaaccactattttctagccctctgtcagagcaaacctcagtgcctctcctctttgcttgt

SEQ ID NO: 126 - DNA, 112 bp, Homo sapien
acacaacttgaatagtaaaatagaaactgagctgaaatttctaattcactttctaaccatagtaagaatgatatttccccccagggatcaccaaatatttataaaaatttgt

SEQ ID NO: 127 - DNA, 54 bp, Homo sapien
accacgaaaccacaaacaagatggaagcatcaatccacttgccaagcacagcag

SEQ ID NO: 128 - DNA, 323 bp, Homo sapien
acctcattagtaattgttttgttgtttcatttttttctaatgtctcccctctaccagctcacctgagataacagaatgaaaatggaaggacagccagatttctcctttgctctctgctcattctctctgaagtctaggttacccattttggggacccattataggcaataaacacagttcccaaagcatttggacagtttcttgttgtgttttagaatggttttcctttttcttagccttttcctgcaaaaggctcactcagtcccttgcttgctcagtggactgggctccccagggcctaggctgccttcttttccatgtcc

SEQ ID NO: 129 - DNA, 192 bp, Homo sapien
  misc_feature (1)...(192): n = A,T,C or G
acatacatgtgtgtatatttttaaatatcacttttgtatcactctgactttttagcatactgaaaacacactaacataatttntgtgaaccatgatcagatacaacccaaatcattcatctagcacattcatctgtgatanaaagataggtgagtttcatttccttcacgttggccaatggataaacaaagt

SEQ ID NO: 130 - DNA, 362 bp, Homo sapien
  misc_feature (1)...(362): n = A,T,C or G
cccttttttatggaatgagtagactgtatgtttgaanatttanccacaacctctttgacatataatgacgcaacaaaaaggtgctgtttagtcctatggttcagtttatgcccctgacaagtttccattgtgttttgccgatcttctggctaatcgtggtatcctccatgttattagtaattctgtattccattttgttaacgcctggtagatgtaacctgctangaggctaactttatacttatttaaaagctcttattttgtggtcattaaaatggcaatttatgtgcagcactttattgcagcaggaagcacgtgtgggttggttgtaaagctctttgctaatcttaaaaagtaatggg

SEQ ID NO: 131 - DNA, 332 bp, Homo sapien
  misc_feature (1)...(332): n = A,T,C or G
ctttttgaaagatcgtgtccactcctgtggacatcttgttttaatggagtttcccatgcagtangactggtatggttgcagctgtccagataaaaacatttgaagagctccaaaatgagagttctcccaggttcgccctgctgctccaagtctcagcagcagcctcttttaggaggcatcttctgaactagattaaggcagcttgtaaatctgatgtgatttggtttattatccaactaacttccatctgttatcactggagaaagcccagactccccangacnggtacggattgtgggcatanaaggattgggtgaagctggcgttgtggt

SEQ ID NO: 132 - DNA, 322 bp, Homo sapien
  misc_feature (1)...(322): n = A,T,C or G
acttttgccattttgtatatataaacaatcttgggacattctcctgaaaactaggtgtccagtggctaagagaactcgatttcaagcaattctgaaaggaaaaccagcatgacacagaatctcaaattcccaaacaggggctctgtgggaaaaatgagggaggacctttgtatctcgggttttagcaagttaaaatgaanatgacaggaaaggcttatttatcaacaaagagaagagttgggatgcttctaaaaaaaactttggtagagaaaataggaatgctnaatcctagggaagcctgtaacaatctacaattggtcca

SEQ ID NO: 133 - DNA, 278 bp, Homo sapien
  misc_feature (1)...(278): n = A,T,C or G
acaagccttcacaagtttaactaaattgggattaatctttctgtanttatctgcataattcttgtttttctttccatctggctcctgggttgacaatttgtggaaacaactctattgctactatttaaaaaaaatcacaaatctttccctttaagctatgttnaattcaaactattcctgctattcctgttttgtcaaagaaattatatttttcaaaatatgtntatttgtttgatgggtcccacgaaacactaataaaaaccacagagaccagcctg

SEQ ID NO: 134 - DNA, 121 bp, Homo sapien
  misc_feature (1)...(121): n = A,T,C or G
gtttanaaaacttgtttagctccatagaggaaagaatgttaaactttgtattttaaaacatgattctctgaggttaaacttggttttcaaatgttatttttacttgtattttgcttttggt

SEQ ID NO: 135 - DNA, 350 bp, Homo sapien
  misc_feature (1)...(350): n = A,T,C or G
acttanaaccatgcctagcacatcagaatccctcaaagaacatcagtataatcctataccatancaagtggtgactggttaagcgtgcgacaaaggtcagctggcacattacttgtgtgcaaacttgatacttttgttctaagtaggaactagtatacagtncctaggantggtactccagggtgccccccaactcctgcagccgctcctctgtgccagnccctgnaaggaactttcgctccacctcaatcaagccctgggccatgctacctgcaattggctgaacaaacgtttgctgagttcccaaggatgcaaagcctggtgctcaactcctggggcgtcaactcagt

SEQ ID NO: 136 - DNA, 399 bp, Homo sapien
  misc_feature (1)...(399): n = A,T,C or G
tgtaccgtgaagacgacagaagttgcatggcagggacagggcagggccgaggccagggttgctgtgattgtatccgaatantcctcgtgagaaaagataatgagatgacgtgagcagcctgcagacttgtgtctgccttcaanaagccagacaggaaggccctgcctgccttggctctgacctggcggccagccagccagccacaggtgggcttcttccttttgtggtgacaacnccaagaaaactgcagaggcccagggtcaggtgtnagtgggtangtgaccataaaacaccaggtgctcccaggaacccgggcaaaggccatccccacctacagccagcatgcccactggcgtgatgggtgcaganggatgaagcagccagntgttctgctgtggt

SEQ ID NO: 137 - DNA, 165 bp, Homo sapien
  misc_feature (1)...(165): n = A,T,C or G
actggtgtggtngggggtgatgctggtggtanaagttgangtgacttcangatggtgtgtggaggaagtgtgtgaacgtagggatgtagangttttggccgtgctaaatgagcttcgggattggctggtcccactggtggtcactgtcattggtggggttcctgt

SEQ ID NO: 138 - DNA, 338 bp, Homo sapien
  misc_feature (1)...(338): n = A,T,C or G
actcactggaatgccacattcacaacagaatcagaggtctgtgaaaacattaatggctccttaacttctccagtaagaatcagggacttgaaatggaaacgttaacagccacatgcccaatgctgggcagtctcccatgccttccacagtgaaagggcttgagaaaaatcacatccaatgtcatgtgtttccagccacaccaaaaggtgcttggggtggagggctgggggcatananggtcangcctcaggaagcctcaagttccattcagctttgccactgtacattccccatntttaaaaaaactgatgccttttttttttttttttgtaaaattc

SEQ ID NO: 139 - DNA, 382 bp, Homo sapien
gggaatcttggtttttggcatctggtttgcctatagccgaggccactttgacagaacaaagaaagggacttcgagtaagaaggtgatttacagccagcctagtgcccgaagtgaaggagaattcaaacagacctcgtcattcctggtgtgagcctggtcggctcaccgcctatcatctgcatttgccttactcaggtgctaccggactctggcccctgatgtctgtagtttcacaggatgccttatttgtcttctacaccccacagggccccctacttcttcggatgtgtttttaataatgtcagctatgtgccccatcctccttcatgccctccctccctttcctaccactgctgagtggcctggaacttgtttaaagtgt

SEQ ID NO: 140 - DNA, 200 bp, Homo sapien
  misc_feature (1)...(200): n = A,T,C or G
accaaancttctttctgttgtgttngattttactataggggtttngcttnttctaaanatacttttcatttaacancttttgttaagtgtcaggctgcactttgctccatanaattattgttttcacatttcaacttgtatgtgtttgtctcttanagcattggtgaaatcacatattttatattcagcataaaggagaa

SEQ ID NO: 141 - DNA, 335 bp, Homo sapien
  misc_feature (1)...(335): n = A,T,C or G
actttattttcaaaacactcatatgttgcaaaaaacacatagaaaaataaagtttggtgggggtgctgactaaacttcaagtcacagacttttatgtgacagattggagcagggtttgttatgcatgtagagaacccaaactaatttattaaacaggatagaaacaggctgtctgggtgaaatggttctgagaaccatccaattcacctgtcagatgctgatanactagctcttcagatgtttttctaccagttcagagatnggttaatgactanttccaatggggaaaaagcaagatggattcacaaaccaagtaattttaaacaaagacactt

SEQ ID NO: 142 - DNA, 459 bp, Homo sapien
  misc_feature (1)...(459): n = A,T,C or G
accaggttaatattgccacatatatcctttccaattgcgggctaaacagacgtgtatttagggttgtttaaagacaacccagcttaatatcaagagaaattgtgacctttcatggagtatctgatggagaaaacactgagttttgacaaatcttattttattcagatagcagtctgatcacacatggtccaacaacactcaaataataaatcaaatatnatcagatgttaaagattggtcttcaaacatcatagccaatgatgccccgcttgcctataatctctccgacataaaaccacatcaacacctcagtggccaccaaaccattcagcacagcttccttaactgtgagctgtttgaagctaccagtctgagcactattgactatntttttcangctctgaatagctctagggatctcagcangggtgggaggaaccagctcaaccttggcgtant

SEQ ID NO: 143 - DNA, 140 bp, Homo sapien
acatttccttccaccaagtcaggactcctggcttctgtgggagttcttatcacctgagggaaatccaaacagtctctcctagaaaggaatagtgtcaccaaccccacccatctccctgagaccatccgacttccctgtgt

SEQ ID NO: 144 - DNA, 164 bp, Homo sapien
  misc_feature (1)...(164): n = A,T,C or G
acttcagtaacaacatacaataacaacattaagtgtatattgccatctttgtcattttctatctataccactctcccttctgaaaacaanaatcactanccaatcacttatacaaatttgaggcaattaatccatatttgttttcaataaggaaaaaaagatgt

SEQ ID NO: 145 - DNA, 303 bp, Homo sapien
  misc_feature (1)...(303): n = A,T,C or G
acgtagaccatccaactttgtatttgtaatggcaaacatccagnagcaattcctaaacaaactggagggtatttatacccaattatcccattcattaacatgccctcctcctcaggctatgcaggacagctatcataagtcggcccaggcatccagatactaccatttgtataaacttcagtaggggagtccatccaagtgacaggtctaatcaaaggaggaaatggaacataagcccagtagtaaaatnttgcttagctgaaacagccacaaaagacttaccgccgtggtgattaccatcaa

SEQ ID NO: 146 - DNA, 327 bp, Homo sapien
  misc_feature (1)...(327): n = A,T,C or G
actgcagctcaattagaagtggtctctgactttcatcancttctccctgggctccatgacactggcctggagtgactcattgctctggttggttgagagagctcctttgccaacaggcctccaagtcagggctgggatttgtttcctttccacattctagcaacaatatgctggccacttcctgaacagggagggtgggaggagccagcatggaacaagctgccactttctaaagtagccagacttgcccctgggcctgtcacacctactgatgaccttctgtgcctgcaggatggaatgtaggggtgagctgtgtgactctatggt

SEQ ID NO: 147 - DNA, 173 bp, Homo sapien
  misc_feature (1)...(173): n = A,T,C or G
acattgtttttttgagataaagcattganagagctctccttaacgtgacacaatggaaggactggaacacatacccacatctttgttctgagggataattttctgataaagtcttgctgtatattcaagcacatatgttatatattattcagttccatgtttatagcctagtt

SEQ ID NO: 148 - DNA, 477 bp, Homo sapien
  misc_feature (1)...(477): n = A,T,C or G
acaaccactttatctcatcgaatttttaacccaaactcactcactgtgcctttctatcctatgggatatattatttgatgctccatttcatcacacatatatgaataatacactcatactgccctactacctgctgcaataatcacattcccttcctgtcctgaccctgaagccattggggtggtcctagtggccatcagtccangcctgcaccttgagcccttgagctccattgctcacnccancccacctcaccgaccccatcctcttacacagctacctccttgctctctaaccccatagattatntccaaattcagtcaattaagttactattaacactctacccgacatgtccagcaccactggtaagccttctccagccaacacacacacacacacacncacacacacacatatccaggcacaggctacctcatcttcacaatcacccctttaattaccatgctatggtgg

SEQ ID NO: 149 - DNA, 207 bp, Homo sapien
acagttgtattataatatcaagaaataaacttgcaatgagagcatttaagagggaagaactaacgtattttagagagccaaggaaggtttctgtggggagtgggatgtaaggtggggcctgatgataaataagagtcagccaggtaagtgggtggtgtggtatgggcacagtgaagaacatttcaggcagagggaacagcagtgaaa

SEQ ID NO: 150 - DNA, 111 bp, Homo sapien
  misc_feature (1)...(111): n = A,T,C or G
accttgatttcattgctgctctgatggaaacccaactatctaatttagctaaaacatgggcacttaaatgtggtcagtgtttggacttgttaactantggcatctttgggt

SEQ ID NO: 151 - DNA, 196 bp, Homo sapien
agcgcggcaggtcatattgaacattccagatacctatcattactcgatgctgttgataacagcaagatggctttgaactcagggtcaccaccagctattggaccttactatgaaaaccatggataccaaccggaaaacccctatcccgcacagcccactgtggtccccactgtctacgaggtgcatccggctcagt

SEQ ID NO: 152 - DNA, 132 bp, Homo sapien
acagcactttcacatgtaagaagggagaaattcctaaatgtaggagaaagataacagaaccttccccttttcatctagtggtggaaacctgatgctttatgttgacaggaatagaaccaggagggagtttgt

SEQ ID NO: 153 - DNA, 285 bp, Homo sapien
  misc_feature (1)...(285): n = A,T,C or G
acaanacccanganaggccactggccgtggtgtcatggcctccaaacatgaaagtgtcagcttctgctcttatgtcctcatctgacaactctttaccatttttatcctcgctcagcaggagcacatcaataaagtccaaagtcttggacttggccttggcttggaggaagtcatcaacaccctggctagtgagggtgcggcgccgctcctggatgacggcatctgtgaagtcgtgcaccagtctgcaggccctgtggaagcgccgtccacacggagtnaggaatt

SEQ ID NO: 154 - DNA, 333 bp, Homo sapien
accacagtcctgttgggccagggcttcatgaccctttctgtgaaaagccatattatcaccaccccaaatttttccttaaatatctttaactgaaggggtcagcctcttgactgcaaagaccctaagccggttacacagctaactcccactggccctgatttgtgaaattgctgctgcctgattggcacaggagtcgaaggtgttcagctcccctcctccgtggaacgagactctgatttgagtttcacaaattctcgggccacctcgtcattgctcctctgaaataaaatccggagaatggtcaggcctgtctcatccatatggatcttccgg

SEQ ID NO: 155 - DNA, 308 bp, Homo sapien
  misc_feature (1)...(308): n = A,T,C or G
actggaaataataaaacccacatcacagtgttgtgtcaaagatcatcagggcatggatgggaaagtgctttgggaactgtaaagtgcctaacacatgatcgatgatttttgttataatatttgaatcacggtgcatacaaactctcctgcctgctcctcctgggccccagccccagccccatcacagctcactgctctgttcatccaggcccagcatgtagtggctgattcttcttggctgcttttagcctccanaagtttctctgaagccaaccaaacctctangtgtaaggcatgctggccctggt

SEQ ID NO: 156 - DNA, 295 bp, Homo sapien
accttgctcggtgcttggaacatattaggaactcaaaatatgagatgataacagtgcctattattgattactgagagaactgttagacatttagttgaagattttctacacaggaactgagaataggagattatgtttggccctcatattctctcctatcctccttgcctcattctatgtctaatatattctcaatcaaataaggttagcataatcaggaaatcgaccaaataccaatataaaaccagatgtctatccttaagattttcaaatagaaaacaaattaacagactat

SEQ ID NO: 157 - DNA, 126 bp, Homo sapien
acaagtttaaatagtgctgtcactgtgcatgtgctgaaatgtgaaatccaccacatttctgaagagcaaaacaaattctgtcatgtaatctctatcttgggtcgtgggtatatctgtccccttagt

SEQ ID NO: 158 - DNA, 442 bp, Homo sapien
  misc_feature (1)...(442): n = A,T,C or G
acccactggtcttggaaacacccatccttaatacgatgatttttctgtcgtgtgaaaatgaanccagcaggctgcccctagtcagtccttccttccagagaaaaagagatttgagaaagtgcctgggtaattcaccattaatttcctcccccaaactctctgagtcttcccttaatatttctggtggttctgaccaaagcaggtcatggtttgttgagcatttgggatcccagtgaagtanatgtttgtagccttgcatacttagcccttcccacgcacaaacggagtggcagagtggtgccaaccctgttttcccagtccacgtagacagattcacagtgcggaattctggaagctgganacagacgggctctttgcagagccgggactctgaganggacatgagggcctctgcctctgtgttcattctctgatgtcctgt

SEQ ID NO: 159 - DNA, 498 bp, Homo sapien
  misc_feature (1)...(498): n = A,T,C or G
acttccaggtaacgttgttgtttccgttgagcctgaactgatgggtgacgttgtaggttctccaacaagaactgaggttgcagagcgggtagggaagagtgctgttccagttgcacctgggctgctgtggactgttgttgattcctcactacggcccaaggttgtggaactggcanaaaggtgtgttgttgganttgagctcgggcggctgtggtaggttgtgggctcttcaacaggggctgctgtggtgccgggangtgaangtgttgtgtcacttgagcttggccagctctggaaagtantanattcttcctgaaggccagcgcttgtggagctggcangggtcantgttgtgtgtaacgaaccagtgctgctgtgggtgggtgtanatcctccacaaagcctgaagttatggtgtcntcaggtaanaatgtggtttcagtgtccctgggcngctgtggaaggttgtanattgtcaccaagggaataagctgtggt

SEQ ID NO: 160 - DNA, 380 bp, Homo sapien
  misc_feature (1)...(380): n = A,T,C or G
acctgcatccagcttccctgccaaactcacaaggagacatcaacctctagacagggaaacagcttcaggatacttccaggagacagagccaccagcagcaaaacaaatattcccatgcctggagcatggcatagaggaagctganaaatgtggggtctgaggaagccatttgagtctggccactagacatctcatcagccacttgtgtgaagagatgccccatgaccccagatgcctctcccacccttacctccatctcacacacttgagctttccactctgtataattctaacatcctggagaaaaatggcagtttgaccgaacctgttcacaacggtagaggctgatttctaacgaaacttgtagaatgaagcctgga

SEQ ID NO: 161 - DNA, 114 bp, Homo sapien
actccacatcccctctgagcaggcggttgtcgttcaaggtgtatttggccttgcctgtcacactgtccactggccccttatccacttggtgcttaatccctcgaaagagcatgt

SEQ ID NO: 162 - DNA, 177 bp, Homo sapien
actttctgaatcgaatcaaatgatacttagtgtagttttaatatcctcatatatatcaaagttttactactctgataattttgtaaaccaggtaaccagaacatccagtcatacagcttttggtgatatataacttggcaataacccagtctggtgatacataaaactactcactgt

SEQ ID NO: 163 - DNA, 137 bp, Homo sapien
  misc_feature (1)...(137): n = A,T,C or G
catttatacagacaggcgtgaagacattcacgacaaaaacgcgaaattctatcccgtgaccanagaaggcagctacggctactcctacatcctggcgtgggtggccttcgcctgcaccttcatcagcggcatgatgt

SEQ ID NO: 164 - DNA, 469 bp, Homo sapien
  misc_feature (1)...(469): n = A,T,C or G
cttatcacaatgaatgttctcctgggcagcgttgtgatctttgccaccttcgtgactttatgcaatgcatcatgctatttcatacctaatgagggagttccaggagattcaaccaggaaatgcatggatctcaaaggaaacaaacacccaataaactcggagtggcagactgacaactgtgagacatgcacttgctacgaaacagaaatttcatgttgcacccttgtttctacacctgtgggttatgacaaagacaactgccaaagaatcttcaagaaggaggactgcaagtatatcgtggtggagaagaaggacccaaaaaagacctgttctgtcagtgaatggataatctaatgtgcttctagtaggcacagggctcccaggccaggcctcattctcctctggcctctaatagtcaatgattgtgtagccatgcctatcagtaaaaagatntttgagcaaacacttt

SEQ ID NO: 165 - DNA, 195 bp, Homo sapien
  misc_feature (1)...(195): n = A,T,C or G
acagttttttatanatatcgacattgccggcacttgtgttcagtttcataaagctggtggatccgctgtcatccactattccttggctagagtaaaaattattcttatagcccatgtccctgcaggccgcccgcccgtagttctcgttccagtcgtcttggcacacagggtgccaggacttcctctgagatgagt

SEQ ID NO: 166 - DNA, 383 bp, Homo sapien
  misc_feature (1)...(383): n = A,T,C or G
acatcttagtagtgtggcacatcagggggccatcagggtcacagtcactcatagcctcgccgaggtcggagtccacaccaccggtgtaggtgtgctcaatcttgggcttggcgcccacctttggagaagggatatgctgcacacacatgtccacaaagcctgtgaactcgccaaagaatttttgcagaccagcctgagcaaggggcggatgttcagcttcagctcctccttcgtcaggtggatgccaacctcgtctanggtccgtgggaagctggtgtccacntcacctacaacctgggcgangatcttataaagaggctccnagataaactccacgaaacttctctgggagctgctagtnggggcctttttggtgaactttc

SEQ ID NO: 167 - DNA, 247 bp, Homo sapien
  misc_feature (1)...(247): n = A,T,C or G
acagagccagaccttggccataaatgaancagagattaagactaaaccccaagtcganattggagcagaaactggagcaagaagtgggcctggggctgaagtagagaccaaggccactgctatanccatacacagagccaactctcaggccaaggcnatggttggggcaganccagagactcaatctgantccaaagtggtggctggaacactggtcatgacanaggcagtgactctgactgangtc

SEQ ID NO: 168 - DNA, 273 bp, Homo sapien
  misc_feature (1)...(273): n = A,T,C or G
acttctaagttttctagaagtggaaggattgtantcatcctgaaaatgggtttacttcaaaatccctcanccttgttcttcacnactgtctatactganagtgtcatgtttccacaaagggctgacacctgagcctgnattttcactcatccctgagaagccctttccagtagggtgggcaattcccaacttccttgccacaagcttcccaggctttctcccctggaaaactccagcttgagtcccagatacactcatgggctgccctgggca

SEQ ID NO: 169 - DNA, 431 bp, Homo sapien
  misc_feature (1)...(431): n = A,T,C or G
acagccttggcttccccaaactccacagtctcagtgcagaaagatcatcttccagcagtcagctcagaccagggtcaaaggatgtgacatcaacagtttctggtttcagaacaggttctactactgtcaaatgaccccccatacttcctcaaaggctgtggtaagttttgcacaggtgagggcagcagaaagggggtanttactgatggacaccatcttctctgtatactccacactgaccttgccatgggcaaaggcccctaccacaaaaacaataggatcactgctgggcaccagctcacgcacatcactgacaaccgggatggaaaaagaantgccaactttcatacatccaactggaaagtgatctgatactggattcttaattaccttcaaaagcttctgggggccatcagctgctcgaacactga

SEQ ID NO: 170 - DNA, 266 bp, Homo sapien
  misc_feature (1)...(266): n = A,T,C or G
acctgtgggctgggctgttatgcctgtgccggctgctgaaagggagttcagaggtggagctcaaggagctctgcaggcattttgccaancctctccanagcanagggagcaacctacactccccgctagaaagacaccagattggagtcctgggagggggagttggggtgggcatttgatgtatacttgtcacctgaatgaangagccagagaggaangagacgaanatganattggccttcaaagctaggggtctggcaggtgga

SEQ ID NO: 171 - DNA, 1248 bp, Homo sapien
  misc_feature (1)...(1248): n = A,T,C or G
ggcagccaaatcataaacggcgaggactgcagcccgcactcgcagccctggcaggcggcactggtcatggaaaacgaattgttctgctcgggcgtcctggtgcatccgcagtgggtgctgtcagccgcacactgtttccagaagtgagtgcagagctcctacaccatcgggctgggcctgcacagtcttgaggccgaccaagagccagggagccagatggtggaggccagcctctccgtacggcacccagagtacaacagacccttgctcgctaacgacctcatgctcatcaagttggacgaatccgtgtccgagtctgacaccatccggagcatcagcattgcttcgcagtgccctaccgcggggaactcttgcctcgtttctggctggggtctgctggcgaacggcagaatgcctaccgtgctgcagtgcgtgaacgtgtcggtggtgtctgaggaggtctgcagtaagctctatgacccgctgtaccaccccagcatgttctgcgccggcggagggcaagaccagaaggactcctgcaacggtgactctggggggcccctgatctgcaacgggtacttgcagggccttgtgtctttcggaaaagccccgtgtggccaagttggcgtgccaggtgtctacaccaacctctgcaaattcactgagtggatagagaaaaccgtccaggccagttaactctggggactgggaacccatgaaattgacccccaaatacatcctgcggaaggaattcaggaatatctgttcccagcccctcctccctcaggcccaggagtccaggcccccagcccctcctccctcaaaccaagggtacagatccccagcccctcctccctcagacccaggagtccagaccccccagcccctcctccctcagacccaggagtccagcccctcctccctcagacccaggagtccagaccccccagcccctcctccctcagacccaggggtccaggcccccaacccctcctccctcagactcagaggtccaagcccccaacccntcattccccagacccagaggtccaggtcccagcccctcntccctcagacccagcggtccaatgccacctagactntccctgtacacagtgcccccttgtggcacgttgacccaaccttaccagttggtttttcatttttngtccctttcccctagatccagaaataaagtttaagagaagngcaaaaaaaaaaaaaaaaaaaaaaaaaaaaaaaaaaaaa

SEQ ID NO: 172 - protein, 159 aa, Homo sapien
  VARIANT (1)...(159): Xaa = Any Amino Acid
MVEASLSVRHPEYNRPLLANDLMLIKLDESVSESDTIRSISIASQCPTAGNSCLVSGWGLLANGRMPTVLQCVNVSVVSEEVCSKLYDPLYHPSMFCAGGGQXQXDSCNGDSGGPLICNGYLQGLVSFGKAPCGQVGVPGVYTNLCKFTEWIEKTVQAS

SEQ ID NO: 173 - DNA, 1265 bp, Homo sapien
  misc_feature (1)...(1265): n = A,T,C or G
ggcagcccgcactcgcagccctggcaggcggcactggtcatggaaaacgaattgttctgctcgggcgtcctggtgcatccgcagtgggtgctgtcagccgcacactgtttccagaactcctacaccatcgggctgggcctgcacagtcttgaggccgaccaagagccagggagccagatggtggaggccagcctctccgtacggcacccagagtacaacagacccttgctcgctaacgacctcatgctcatcaagttggacgaatccgtgtccgagtctgacaccatccggagcatcagcattgcttcgcagtgccctaccgcggggaactcttgcctcgtttctggctggggtctgctggcgaacggtgagctcacgggtgtgtgtctgccctcttcaaggaggtcctctgcccagtcgcgggggctgacccagagctctgcgtcccaggcagaatgcctaccgtgctgcagtgcgtgaacgtgtcggtggtgtctgaggaggtctgcagtaagctctatgacccgctgtaccaccccagcatgttctgcgccggcggagggcaagaccagaaggactcctgcaacggtgactctggggggcccctgatctgcaacgggtacttgcagggccttgtgtctttcggaaaagccccgtgtggccaagttggcgtgccaggtgtctacaccaacctctgcaaattcactgagtggatagagaaaaccgtccaggccagttaactctggggactgggaacccatgaaattgacccccaaatacatcctgcggaaggaattcaggaatatctgttcccagcccctcctccctcaggcccaggagtccaggcccccagcccctcctccctcaaaccaagggtacagatccccagcccctcctccctcagacccaggagtccagaccccccagcccctcctccctcagacccaggagtccagcccctcctccntcagacccaggagtccagaccccccagcccctcctccctcagacccaggggttgaggcccccaacccctcctccttcagagtcagaggtccaagcccccaacccctcgttccccagacccagaggtnnaggtcccagcccctcttccntcagacccagnggtccaatgccacctagattttccctgnacacagtgcccccttgtggnangttgacccaaccttaccagttggtttttcatttttngtccctttcccctagatccagaaataaagtttaagagangngcaaaaaaaaaa

SEQ ID NO: 174 - DNA, 1459 bp, Homo sapien
  misc_feature (1)...(1459): n = A,T,C or G
ggtcagccgcacactgtttccagaagtgagtgcagagctcctacaccatcgggctgggcctgcacagtcttgaggccgaccaagagccagggagccagatggtggaggccagcctctccgtacggcacccagagtacaacagacccttgctcgctaacgacctcatgctcatcaagttggacgaatccgtgtccgagtctgacaccatccggagcatcagcattgcttcgcagtgccctaccgcggggaactcttgcctcgtttctggctggggtctgctggcgaacggtgagctcacgggtgtgtgtctgccctcttcaaggaggtcctctgcccagtcgcgggggctgacccagagctctgcgtcccaggcagaatgcctaccgtgctgcagtgcgtgaacgtgtcggtggtgtctgangaggtctgcantaagctctatgacccgctgtaccaccccancatgttctgcgccggcggagggcaagaccagaaggactcctgcaacgtgagagaggggaaaggggagggcaggcgactcagggaagggtggagaagggggagacagagacacacagggccgcatggcgagatgcagagatggagagacacacagggagacagtgacaactagagagagaaactgagagaaacagagaaataaacacaggaataaagagaagcaaaggaagagagaaacagaaacagacatggggaggcagaaacacacacacatagaaatgcagttgaccttccaacagcatggggcctgagggcggtgacctccacccaatagaaaatcctcttataacttttgactccccaaaaacctgactagaaatagcctactgttgacggggagccttaccaataacataaatagtcgatttatgcatacgttttatgcattcatgatatacctttgttggaattttttgatatttctaagctacacagttcgtctgtgaatttttttaaattgttgcaactctcctaaaatttttctgatgtgtttattgaaaaaatccaagtataagtggacttgtgcattcaaaccagggttgttcaagggtcaactgtgtacccagagggaaacagtgacacagattcatagaggtgaaacacgaagagaaacaggaaaaatcaagactctacaaagaggctgggcagggtggctcatgcctgtaatcccagcactttgggaggcgaggcaggcagatcacttgaggtaaggagttcaagaccagcctggccaaaatggtgaaatcctgtctgtactaaaaatacaaaagttagctggatatggtggcaggcgcctgtaatcccagctacttgggaggctgaggcaggagaattgcttgaatatgggaggcagaggttgaagtgagttgagatcacaccactatactccagctggggcaacagagtaagactctgtctcaaaaaaaaaaaaaaaaaa

SEQ ID NO: 175 - DNA, 1167 bp, Homo sapien
  misc_feature (1)...(1167): n = A,T,C or G
gcgcagccctggcaggcggcactggtcatggaaaacgaattgttctgctcgggcgtcctggtgcatccgcagtgggtgctgtcagccgcacactgtttccagaactcctacaccatcgggctgggcctgcacagtcttgaggccgaccaagagccagggagccagatggtggaggccagcctctccgtacggcacccagagtacaacagactcttgctcgctaacgacctcatgctcatcaagttggacgaatccgtgtccgagtctgacaccatccggagcatcagcattgcttcgcagtgccctaccgcggggaactcttgcctcgtntctggctggggtctgctggcgaacggcagaatgcctaccgtgctgcactgcgtgaacgtgtcggtggtgtctgaggangtctgcagtaagctctatgacccgctgtaccaccccagcatgttctgcgccggcggagggcaagaccagaaggactcctgcaacggtgactctggggggcccctgatctgcaacgggtacttgcagggccttgtgtctttcggaaaagccccgtgtggccaacttggcgtgccaggtgtctacaccaacctctgcaaattcactgagtggatagagaaaaccgtccagnccagttaactctggggactgggaacccatgaaattgacccccaaatacatcctgcggaangaattcaggaatatctgttcccagcccctcctccctcaggcccaggagtccaggcccccagcccctcctccctcaaaccaagggtacagatccccagcccctcctccctcagacccaggagtccagaccccccagcccctcntccntcagacccaggagtccagcccctcctccntcagacgcaggagtccagaccccccagcccntcntccgtcagacccaggggtgcaggcccccaacccctcntccntcagagtcagaggtccaagcccccaacccctcgttccccagacccagaggtncaggtcccagcccctcctccctcagacccagcggtccaatgccacctagantntccctgtacacagtgcccccttgtggcangttgacccaaccttaccagttggtttttcattttttgtccctttcccctagatccagaaataaagtntaagagaagcgcaaaaaaa

SEQ ID NO: 176 - protein, 205 aa, Homo sapien
  VARIANT (1)...(205): Xaa = Any Amino Acid
MENELFCSGVLVHPQWVLSAAHCFQNSYTIGLGLHSLEADQEPGSQMVEASLSVRHPEYNRLLLANDLMLIKLDESVSESDTIRSISIASQCPTAGNSCLVSGWGLLANGRMPTVLHCVNVSVVSEXVCSKLYDPLYHPSMFCAGGGQDQKDSCNGDSGGPLICNGYLQGLVSFGKAPCGQLGVPGVYTNLCKFTEWIEKTVQXS

SEQ ID NO: 177 - DNA, 1119 bp, Homo sapien
gcgcactcgcagccctggcaggcggcactggtcatggaaaacgaattgttctgctcgggcgtcctggtgcatccgcagtgggtgctgtcagccgcacactgtttccagaactcctacaccatcgggctgggcctgcacagtcttgaggccgaccaagagccagggagccagatggtggaggccagcctctccgtacggcacccagagtacaacagacccttgctcgctaacgacctcatgctcatcaagttggacgaatccgtgtccgagtctgacaccatccggagcatcagcattgcttcgcagtgccctaccgcggggaactcttgcctcgtttctggctggggtctgctggcgaacgatgctgtgattgccatccagtcccagactgtgggaggctgggagtgtgagaagctttcccaaccctggcagggttgtaccatttcggcaacttccagtgcaaggacgtcctgctgcatcctcactgggtgctcactactgctcactgcatcacccggaacactgtgatcaactagccagcaccatagttctccgaagtcagactatcatgattactgtgttgactgtgctgtctattgtactaaccatgccgatgtttaggtgaaattagcgtcacttggcctcaaccatcttggtatccagttatcctcactgaattgagatttcctgcttcagtgtcagccattcccacataatttctgacctacagaggtgagggatcatatagctcttcaaggatgctggtactcccctcacaaattcatttctcctgttgtagtgaaaggtgcgccctctggagcctcccagggtgggtgtgcaggtcacaatgatgaatgtatgatcgtgttcccattacccaaagcctttaaatccctcatgctcagtacaccagggcaggtctagcatttcttcatttagtgtatgctgtccattcatgcaaccacctcaggactcctggattctctgcctagttgagctcctgcatgctgcctccttggggaggtgagggagagggcccatggttcaatgggatctgtgcagttgtaacacattaggtgcttaataaacagaagctgtgatgttaaaaaaaaaaaaaaa

SEQ ID NO: 178 - protein, 164 aa, Homo sapien
  VARIANT (1)...(164): Xaa = Any Amino Acid
MENELFCSGVLVHPQWVLSAAHCFQNSYTIGLGLHSLEADQEPGSQMVEASLSVRHPEYNRPLLANDLMLIKLDESVSESDTIRSISIASQCPTAGNSCLVSGWGLLANDAVIAIQSXTVGGWECEKLSQPWQGCTISATSSARTSCCILTGCSLLLTASPGTL

SEQ ID NO: 179 - DNA, 250 bp, Homo sapien
ctggagtgccttggtgtttcaagcccctgcaggaagcagaatgcaccttctgaggcacctccagctgcccccggccgggggatgcgaggctcggagcacccttgcccggctgtgattgctgccaggcactgttcatctcagcttttctgtccctttgctcccggcaagcgcttctgctgaaagttcatatctggagcctgatgtcttaacgaataaaggtcccatgctccacccgaaaaaaaaaaaaaaa

SEQ ID NO: 180 - DNA, 202 bp, Homo sapien
actagtccagtgtggtggaattccattgtgttgggcccaacacaatggctacctttaacatcacccagaccccgcccctgcccgtgccccacgctgctgctaacgacagtatgatgcttactctgctactcggaaactatttttatgtaattaatgtatgctttcttgtttataaatgcctgatttaaaaaaaaaaaaaaaa

SEQ ID NO: 181 - DNA, 558 bp, Homo sapien
  misc_feature (1)...(558): n = A,T,C or G
tccytttgktnaggtttkkgagacamccckagacctwaanctgtgtcacagacttcynggaatgtttaggcagtgctagtaatttcytcgtaatgattctgttattactttcctnattctttattcctctttcttctgaagattaatgaagttgaaaattgaggtggataaatacaaaaaggtagtgtgatagtataagtatctaagtgcagatgaaagtgtgttatatatatccattcaaaattatgcaagttagtaattactcagggttaactaaattactttaatatgctgttgaacctactctgttccttggctagaaaaaattataaacaggactttgttagtttgggaagccaaattgataatattctatgttctaaaagttgggctatacataaattattaagaaatatggawttttattcccaggaatatggkgttcattttatgaatattacscrggatagawgtwtgagtaaaaycagttttggtwaataygtwaatatgtcmtaaataaacaakgctttgacttatttccaaaaaaaaaaaaaaaaa

SEQ ID NO: 182 - DNA, 479 bp, Homo sapien
  misc_feature (1)...(479): n = A,T,C or G
acagggwttkgrggatgctaagsccccrgarwtygtttgatccaaccctggcttwttttcagaggggaaaatggggcctagaagttacagmscatytagytggtgcgmtggcacccctggcstcacacagastcccgagtagctgggactacaggcacacagtcactgaagcaggccctgttwgcaattcacgttgccacctccaacttaaacattcttcatatgtgatgtccttagtcactaaggttaaactttcccacccagaaaaggcaacttagataaaatcttagagtactttcatactmttctaagtcctcttccagcctcactkkgagtcctmcytgggggttgataggaantntctcttggctttctcaataaartctctatycatctcatgtttaatttggtacgcataraawtgstgaraaaattaaaatgttctggttymactttaaaaaraaaaaaaaaaaaaaaaa

SEQ ID NO: 183 - DNA, 384 bp, Homo sapien
aggcgggagcagaagctaaagccaaagcccaagaagagtggcagtgccagcactggtgccagtaccagtaccaataacagtgccagtgccagtgccagcaccagtggtggcttcagtgctggtgccagcctgaccgccactctcacatttgggctcttcgctggccttggtggagctggtgccagcaccagtggcagctctggtgcctgtggtttctcctacaagtgagattttagatattgttaatcctgccagtctttctcttcaagccagggtgcatcctcagaaacctactcaacacagcactctaggcagccactatcaatcaattgaagttgacactctgcattaratctatttgccatttcaaaaaaaaaaaaaaaa

SEQ ID NO: 184 - DNA, 496 bp, Homo sapien
  misc_feature (1)...(496): n = A,T,C or G
accgaattgggaccgctggcttataagcgatcatgtyyntccrgtatkacctcaacgagcagggagatcgagtctatacgctgaagaaatttgacccgatgggacaacagacctgctcagcccatcctgctcggttctccccagatgacaaatactctsgacaccgaatcaccatcaagaaacgcttcaaggtgctcatgacccagcaaccgcgccctgtcctctgagggtcccttaaactgatgtcttttctgccacctgttacccctcggagactccgtaaccaaactcttcggactgtgagccctgatgcctttttgccagccatactctttggcatccagtctctcgtggcgattgattatgcttgtgtgaggcaatcatggtggcatcacccataaagggaacacatttgacttttttttctcatattttaaattactacmagawtattwmagawwaaatgawttgaaaaactsttaaaaaaaaaaaaaaa

SEQ ID NO: 185 - DNA, 384 bp, Homo sapien
gctggtagcctatggcgkggcccacggaggggctcctgaggccacggracagtgacttcccaagtatcytgcgcsgcgtcttctaccgtccctacctgcagatcttcgggcagattccccaggaggacatggacgtggccctcatggagcacagcaactgytcgtcggagcccggcttctgggcacaccctcctggggcccaggcgggcacctgcgtctcccagtatgccaactggctggtggtgctgctcctcgtcatcttcctgctcgtggccaacatcctgctggtcaacttgctcattgccatgttcagttacacattcggcaaagtacagggcaacagcgatctctactgggaaggcgcagcgttaccgcctcatccgg

SEQ ID NO: 186 - DNA, 577 bp, Homo sapien
  misc_feature (1)...(577): n = A,T,C or G
gagttagctcctccacaaccttgatgaggtcgtctgcagtggcctctcgcttcataccgctnccatcgtcatactgtaggtttgccaccacytcctggcatcttggggcggcntaatattccaggaaactctcaatcaagtcaccgtcgatgaaacctgtgggctggttctgtcttccgctcggtgtgaaaggatctcccagaaggagtgctcgatcttccccacacttttgatgactttattgagtcgattctgcatgtccagcaggaggttgtaccagctctctgacagtgaggtcaccagccctatcatgccgttgamcgtgccgaagarcaccgagccttgtgtgggggkkgaagtctcacccagattctgcattaccagagagccgtggcaaaagacattgacaaactcgcccaggtggaaaaagamcamctcctggargtgctngccgctcctcgtcmgttggtggcagcgctwtccttttgacacacaaacaagttaaaggcattttcagcccccagaaanttgtcatcatccaagatntcgcacagcactnatccagttgggattaaat

SEQ ID NO: 187 - DNA, 534 bp, Homo sapien
  misc_feature (1)...(534): n = A,T,C or G
aacatcttcctgtataatgctgtgtaatatcgatccgatnttgtctgstgagaatycatwactkggaaaagmaacattaaagcctggacactggtattaaaattcacaatatgcaacactttaaacagtgtgtcaatctgctcccyynactttgtcatcaccagtctgggaakaagggtatgccctattcacacctgttaaaagggcgctaagcatttttgattcaacatctttttttttgacacaagtccgaaaaaagcaaaagtaaacagttatyaatttgttagccaattcactttcttcatgggacagagccatytgatttaaaaagcaaattgcataatattgagcttygggagctgatatttgagcggaagagtagcctttctacttcaccagacacaactccctttcatattgggatgttnacnaaagtwatgtctctwacagatgggatgcttttgtggcaattctgttctgaggatctcccagtttatttaccacttgcacaagaaggcgttttcttcctcaggc

SEQ ID NO: 188 - DNA, 761 bp, Homo sapien
  misc_feature (1)...(761): n = A,T,C or G
agaaaccagtatctctnaaaacaacctctcataccttgtggacctaattttgtgtgcgtgtgtgtgtgcgcgcatattatatagacaggcacatcttttttacttttgtaaaagcttatgcctctttggtatctatatctgtgaaagttttaatgatctgccataatgtcttggggacctttgtcttctgtgtaaatggtactagagaaaacacctatnttatgagtcaatctagttngttttattcgacatgaaggaaatttccagatnacaacactnacaaactctccctkgackargggggacaaagaaaagcaaaactgamcataaraaacaatwacctggtgagaarttgcataaacagaaatwrggtagtatattgaarnacagcatcattaaarmgttwtkttwttctcccttgcaaaaaacatgtacngacttcccgttgagtaatgccaagttgttttttttatnataaaacttgcccttcattacatgtttnaaagtggtgtggtgggccaaaatattgaaatgatggaactgactgataaagctgtacaaataagcagtgtgcctaacaagcaacacagtaatgttgacatgcttaattcacaaatgctaatttcattataaatgtttgctaaaatacactttgaactatttttctgtnttcccagagctgagatnttagattttatgtagtatnaagtgaaaaantacgaaaataataacattgaagaaaaananaaaaaanaaaaaaa

SEQ ID NO: 189 - DNA, 482 bp, Homo sapien
  misc_feature (1)...(482): n = A,T,C or G
tttttttttttttgccgatnctactattttattgcaggangtgggggtgtatgcaccgcacaccggggctatnagaagcaagaaggaaggagggagggcacagccccttgctgagcaacaaagccgcctgctgccttctctgtctgtctcctggtgcaggcacatggggagaccttccccaaggcaggggccaccagtccaggggtgggaatacagggggtgggangtgtgcataagaagtgataggcacaggccacccggtacagacccctcggctcctgacaggtngatttcgaccaggtcattgtgccctgcccaggcacagcgtanatctggaaaagacagaatgctttccttttcaaatttggctngtcatngaangggcanttttccaanttnggctnggtcttggtacncttggttcggcccagctccncgtccaaaaantattcacccnnctccnaattgcttgcnggnccccc

SEQ ID NO: 190 - DNA, 471 bp, Homo sapien
  misc_feature (1)...(471): n = A,T,C or G
ttttttttttttttaaaacagtttttcacaacaaaatttattagaagaatagtggttttgaaaactctcgcatccagtgagaactaccatacaccacattacagctnggaatgtnctccaaatgtctggtcaaatgatacaatggaaccattcaatcttacacatgcacgaaagaacaagcgcttttgacatacaatgcacaaaaaaaaaaggggggggggaccacatggattaaaattttaagtactcatcacatacattaagacacagttctagtccagtcnaaaatcagaactgcnttgaaaaatttcatgtatgcaatccaaccaaagaacttnattggtgatcatgantnctctactacatcnaccttgatcattgccaggaacnaaaagttnaaancacncngtacaaaaanaatctgtaattnanttcaacctccgtacngaaaaatnttnnttatacactccc

SEQ ID NO: 191 - DNA, 402 bp, Homo sapien
  misc_feature (1)...(402): n = A,T,C or G
gagggattgaaggtctgttctastgtcggmctgttcagccaccaactctaacaagttgctgtcttccactcactgtctgtaagctttttaacccagacwgtatcttcataaatagaacaaattcttcaccagtcacatcttctaggacctttttggattcagttagtataagctcttccacttcctttgttaagacttcatctggtaaagtcttaagttttgtagaaaggaattyaattgctcgttctctaacaatgtcctctccttgaagtatttggctgaacaacccacctaaagtccctttgtgcatccattttaaatatacttaatagggcattgktncactaggttaaattctgcaagagtcatctgtctgcaaaagttgcgttagtatatctgcca

SEQ ID NO: 192 - DNA, 601 bp, Homo sapien
  misc_feature (1)...(601): n = A,T,C or G
gagctcggatccaataatctttgtctgagggcagcacacatatncagtgccatggnaactggtctaccccacatgggagcagcatgccgtagntatataaggtcattccctgagtcagacatgcytytttgaytaccgtgtgccaagtgctggtgattctyaacacacytccatcccgytcttttgtggaaaaactggcacttktctggaactagcargacatcacttacaaattcacccacgagacacttgaaaggtgtaacaaagcgaytcttgcattgctttttgtccctccggcaccagttgtcaatactaacccgctggtttgcctccatcacatttgtgatctgtagctctggatacatctcctgacagtactgaagaacttcttcttttgtttcaaaagcarctcttggtgcctgttggatcaggttcccatttcccagtcygaatgttcacatggcatatttwacttcccacaaaacattgcgatttgaggctcagcaacagcaaatcctgttccggcattggctgcaagagcctcgatgtagccggccagcgccaaggcaggcgccgtgagccccaccagcagcagaagcag

SEQ ID NO: 193 - DNA, 608 bp, Homo sapien
  misc_feature (1)...(608): n = A,T,C or G
atacagcccanatcccaccacgaagatgcgcttgttgactgagaacctgatgcggtcactggtcccgctgtagccccagcgactctccacctgctggaagcggttgatgctgcactcyttcccaacgcaggcagmagcgggsccggtcaatgaactccaytcgtggcttggggtkgacggtkaagtgcaggaagaggctgaccacctcgcggtccaccaggatgcccgactgtgcgggacctgcagcgaaactcctcgatggtcatgagcgggaagcgaatgaggcccagggccttgcccagaaccttccgcctgttctctggcgtcacctgcagctgctgccgctgacactcggcctcggaccagcggacaaacggcrttgaacagccgcacctcacggatgcccagtgtgtcgcgctccaggammgscaccagcgtgtccaggtcaatgtcggtgaagccctccgcgggtratggcgtctgcagtgtttttgtcgatgttctccaggcacaggctggccagctgcggttcatcgaagagtcgcgcctgcgtgagcagcatgaaggcgttgtcggctcgcagttcttcttcaggaactccacgcaat

SEQ ID NO: 194 - DNA, 392 bp, Homo sapien
  misc_feature (1)...(392): n = A,T,C or G
gaacggctggaccttgcctcgcattgtgcttgctggcagggaataccttggcaagcagytccagtccgagcagccccagaccgctgccgcccgaagctaagcctgcctctggccttcccctccgcctcaatgcagaaccagtagtgggagcactgtgtttagagttaagagtgaacactgtttgattttacttgggaatttcctctgttatatagcttttcccaatgctaatttccaaacaacaacaacaaaataacatgtttgcctgttaagttgtataaaagtaggtgattctgtatttaaagaaaatattactgttacatatactgcttgcaatttctgtatttattgktnctstggaaataaatatagttattaaaggttgtcantcc

SEQ ID NO: 195 - DNA, 502 bp, Homo sapien
  misc_feature (1)...(502): n = A,T,C or G
ccsttkgaggggtkaggkyccagttyccgagtggaagaaacaggccaggagaagtgcgtgccgagctgaggcagatgttcccacagtgacccccagagccstgggstatagtytctgacccctcncaaggaaagaccacsttctggggacatgggctggagggcaggacctagaggcaccaagggaaggccccattccggggstgttccccgaggaggaagggaaggggctctgtgtgccccccasgaggaagaggccctgagtcctgggatcagacaccccttcacgtgtatccccacacaaatgcaagctcaccaaggtcccctctcagtccccttccstacaccctgamcggccactgscscacacccacccagagcacgccacccgccatggggartgtgctcaaggartcgcngggcarcgtggacatctngtcccagaagggggcagaatctccaataganggactgarcmsttgctnanaaaaaaaaanaaaaaa

SEQ ID NO: 196 - DNA, 665 bp, Homo sapien
  misc_feature (1)...(665): n = A,T,C or G
ggttacttggtttcattgccaccacttagtggatgtcatttagaaccattttgtctgctccctctggaagccttgcgcagagcggactttgtaattgttggagaataactgctgaattttwagctgtttkgagttgattsgcaccactgcacccacaacttcaatatgaaaacyawttgaactwatttattatcttgtgaaaagtataacaatgaaaattttgttcatactgtattkatcaagtatgatgaaaagcaawagatatatattcttttattatgttaaattatgattgccattattaatcggcaaaatgtggagtgtatgttcttttcacagtaatatatgccttttgtaacttcacttggttattttattgtaaatgarttacaaaattcttaatttaagaraatggtatgtwatatttatttcattaatttctttcctkgtttacgtwaattttgaaaagawtgcatgatttcttgacagaaatcgatcttgatgctgtggaagtagtttgacccacatccctatgagtttttcttagaatgtataaaggttgtagcccatcnaacttcaaagaaaaaaatgaccacatactttgcaatcaggctgaaatgtggcatgctnttctaattccaactttataaactagcaaanaagtg

SEQ ID NO: 197 - DNA, 492 bp, Homo sapien
  misc_feature (1)...(492): n = A,T,C or G
ttttntttttttttttttgcaggaaggattccatttattgtggatgcattttcacaatatatgtttattggagcgatccattatcagtgaaaagtatcaagtgtttataanatttttaggaaggcagattcacagaacatgctngtcngcttgcagttttacctcgtanagatnacagagaattatagtcnaaccagtaaacnaggaatttacttttcaaaagattaaatccaaactgaacaaaattctaccctgaaacttactccatccaaatattggaataanagtcagcagtgatacattctcttctgaactttagattttctagaaaaatatgtaatagtgatcaggaagagctcttgttcaaaagtacaacnaagcaatgttcccttaccataggccttaattcaaactttgatccatttcactcccatcacgggagtcaatgctacctgggacacttgtattttgttcatnctgancntggcttaa

SEQ ID NO: 198 - DNA, 478 bp, Homo sapien
  misc_feature (1)...(478): n = A,T,C or G
tttnttttgnatttcantctgtannaantattttcattatgtttattanaaaaatatnaatgtntccacnacaaatcatnttacntnagtaagaggccanctacattgtacaacatacactgagtatattttgaaaaggacaagtttaaagtanacncatattgccgancatancacatttatacatggcttgattgatatttagcacagcanaaactgagtgagttaccagaaanaaatnatatatgtcaatcngatttaagatacaaaacagatcctatggtacatancatcntgtaggagttgtggctttatgtttactgaaagtcaatgcagttcctgtacaaagagatggccgtaagcattctagtacctctactccatggttaagaatcgtacacttatgtttacatatgtncagggtaagaattgtgttaagtnaanttatggagaggtccangagaaaaatttgatncaa

SEQ ID NO: 199 - DNA, 482 bp, Homo sapien
  misc_feature (1)...(482): n = A,T,C or G
agtgacttgtcctccaacaaaaccccttgatcaagtttgtggcactgacaatcagacctatgctagttcctgtcatctattcgctactaaatgcagactggaggggaccaaaaaggggcatcaactccagctggattattttggagcctgcaaatctattcctacttgtacggactttgaagtgattcagtttcctctacggatgagagactggctcaagaatatcctcatgcagctttatgaagccnactctgaacacgctggttatctnagatgagaancagagaaataaagtcnagaaaatttacctggangaaaagaggctttnggctggggaccatcccattgaaccttctcttaanggactttaagaanaaactaccacatgtntgtngtatcctggtgccnggccgtttantgaacntngacnncacccttntggaatanantcttgacngcntcctgaacttgctcctctgcga

SEQ ID NO: 200 - DNA, 270 bp, Homo sapien
  misc_feature (1)...(270): n = A,T,C or G
cggccgcaagtgcaactccagctggggccgtgcggacgaagattctgccagcagttggtccgactgcgacgacggcggcggcgacagtcgcaggtgcagcgcgggcgcctggggtcttgcaaggctgagctgacgccgcagaggtcgtgtcacgtcccacgaccttgacgccgtcggggacagccggaacagagcccggtgaangcgggaggcctcggggagcccctcgggaagggcggcccgagagatacgcaggtgcaggtggccgcc

SEQ ID NO: 201 - DNA, 419 bp, Homo sapien
  misc_feature (1)...(419): n = A,T,C or G
ttttttttttttttggaatctactgcgagcacagcaggtcagcaacaagtttattttgcagctagcaaggtaacagggtagggcatggttacatgttcaggtcaacttcctttgtcgtggttgattggtttgtctttatgggggcggggtggggtaggggaaancgaagcanaantaacatggagtgggtgcaccctccctgtagaacctggttacnaaagcttggggcagttcacctggtctgtgaccgtcattttcttgacatcaatgttattagaagtcaggatatcttttagagagtccactgtntctggagggagattagggtttcttgccaanatccaancaaaatccacntgaaaaagttggatgatncangtacngaataccganggcatanttctcatantcggtggcca

SEQ ID NO: 202 - DNA, 509 bp, Homo sapien
  misc_feature (1)...(509): n = A,T,C or G
tttntttttttttttttttttttttttttttttttttttttttttttttttttttttttttggcacttaatccatttttatttcaaaatgtctacaaantttnaatncnccattatacnggtnattttncaaaatctaaannttattcaaatntnagccaaantccttacncaaatnnaatacncncaaaaatcaaaaatatacntntctttcagcaaacttngttacataaattaaaaaaatatatacggctggtgttttcaaagtacaattatcttaacactgcaaacatntttnnaaggaactaaaataaaaaaaaacactnccgcaaaggttaaagggaacaacaaattcnttttacaacancnncnattataaaaatcatatctcaaatcttaggggaatatatacttcacacngggatcttaacttttactncactttgtttatttttttanaaccattgtnttgggcccaacacaatggnaatnccnccncnctggactagt

SEQ ID NO: 203 - DNA, 583 bp, Homo sapien
  misc_feature (1)...(583): n = A,T,C or G
ttttttttttttttttttgacccccctcttataaaaaacaagttaccattttattttacttacacatatttattttataattggtattagatattcaaaaggcagcttttaaaatcaaactaaatggaaactgccttagatacataattcttaggaattagcttaaaatctgcctaaagtgaaaatcttctctagctcttttgactgtaaatttttgactcttgtaaaacatccaaattcatttttcttgtctttaaaattatctaatctttccattttttccctattccaagtcaatttgcttctctagcctcatttcctagctcttatctactattagtaagtggcttttttcctaaaagggaaaacaggaagaganaatggcacacaaaacaaacattttatattcatatttctacctacgttaataaaatagcattttgtgaagccagctcaaaagaaggcttagatccttttatgtccattttagtcactaaacgatatcnaaagtgccagaatgcaaaaggtttgtgaacatttattcaaaagctaatataagatatttcacatactcatctttctg

SEQ ID NO: 204 - DNA, 589 bp, Homo sapien
  misc_feature (1)...(589): n = A,T,C or G
ttttttttntttttttttttttttttnctcttctttttttttganaatgaggatcgagtttttcactctctagatagggcatgaagaaaactcatctttccagctttaaaataacaatcaaatctcttatgctatatcatattttaagttaaactaatgagtcactggcttatcttctcctgaaggaaatctgttcattcttctcattcatatagttatatcaagtactaccttgcatattgagaggtttttcttctctatttacacatatatttccatgtgaatttgtatcaaacctttattttcatgcaaactagaaaataatgtnttcttttgcataagagaagagaacaatatnagcattacaaaactgctcaaattgtttgttaagnttatccattataattagttnggcaggagctaatacaaatcacatttacngacnagcaataataaaactgaagtaccagttaaatatccaaaataattaaaggaacatttttagcctgggtataattagctaattcactttacaagcatttattnagaatgaattcacatgttattattccntagcccaacacaatgg

SEQ ID NO: 205 - DNA, 545 bp, Homo sapien
  misc_feature (1)...(545): n = A,T,C or G
tttttnttttttttttcagtaataatcagaacaatatttatttttatatttaaaattcatagaaaagtgccttacatttaataaaagtttgtttctcaaagtgatcagaggaattagatatngtcttgaacaccaatattaatttgaggaaaatacaccaaaatacattaagtaaattatttaagatcatagagcttgtaagtgaaaagataaaatttgacctcagaaactctgagcattaaaaatccactattagcaaataaattactatggacttcttgctttaattttgtgatgaatatggggtgtcactggtaaaccaacacattctgaaggatacattacttagtgatagattcttatgtactttgctanatnacgtggatatgagttgacaagtttctctttcttcaatcttttaaggggcngangaaatgaggaagaaaagaaaaggattacgcatactgttctttctatnggaaggattagatatgtttcctttgccaatattaaaaaaataataatgtttactactagtgaaaccc

SEQ ID NO: 206 - DNA, 487 bp, Homo sapien
  misc_feature (1)...(487): n = A,T,C or G
ttttttttttttttttagtcaagtttctnatttttattataattaaagtcttggtcatttcatttattagctctgcaacttacatatttaaattaaagaaacgttnttagacaactgtnacaatttataaatgtaaggtgccattattgagtanatatattcctccaagagtggatgtgtcccttctcccaccaactaatgaancagcaacattagtttaattttattagtagatnatacactgctgcaaacgctaattctcttctccatccccatgtngatattgtgtatatgtgtgagttggtnagaatgcatcancaatctnacaatcaacagcaagatgaagctaggcntgggctttcggtgaaaatagactgtgtctgtctgaatcaaatgatctgacctatcctcggtggcaagaactcttcgaaccgcttcctcaaaggcngctgccacatttgtggcntctnttgcacttgtttcaaaa

SEQ ID NO: 207 - DNA, 332 bp, Homo sapien
  misc_feature (1)...(332): n = A,T,C or G
tgaattggctaaaagactgcatttttanaactagcaactcttatttctttcctttaaaaatacatagcattaaatcccaaatcctatttaaagacctgacagcttgagaaggtcactactgcatttataggaccttctggtggttctgctgttacntttgaantctgacaatccttganaatctttgcatgcagaggaggtaaaaggtattggattttcacagaggaanaacacagcgcagaaatgaaggggccaggcttactgagcttgtccactggagggctcatgggtgggacatggaaaagaaggcagcctaggccctggggagccca

SEQ ID NO: 208 - DNA, 524 bp, Homo sapien
  misc_feature (1)...(524): n = A,T,C or G
agggcgtggtgcggagggcgttactgttttgtctcagtaacaataaatacaaaaagactggttgtgttccggccccatccaaccacgaagttgatttctcttgtgtgcagagtgactgattttaaaggacatggagcttgtcacaatgtcacaatgtcacagtgtgaagggcacactcactcccgcgtgattcacatttagcaaccaacaatagctcatgagtccatacttgtaaatacttttggcagaatacttnttgaaacttgcagatgataactaagatccaagatatttcccaaagtaaatagaagtgggtcataatattaattacctgttcacatcagcttccatttacaagtcatgagcccagacactgacatcaaactaagcccacttagactcctcaccaccagtctgtcctgtcatcagacaggaggctgtcaccttgaccaaattctcaccagtcaatcatctatccaaaaaccattacctgatccacttccggtaatgcaccaccttggtga

SEQ ID NO: 209 - DNA, 159 bp, Homo sapien
gggtgaggaaatccagagttgccatggagaaaattccagtgtcagcattcttgctccttgtggccctctcctacactctggccagagataccacagtcaaacctggagccaaaaaggacacaaaggactctcgacccaaactgccccagaccctctcca

SEQ ID NO: 210 - DNA, 256 bp, Homo sapien
  misc_feature (1)...(256): n = A,T,C or G
actccctggcagacaaaggcagaggagagagctctgttagttctgtgttgttgaactgccactgaatttctttccacttggactattacatgccanttgagggactaatggaaaaacgtatggggagattttanccaatttangtntgtaaatggggagactggggcaggcgggagagatttgcagggtgnaaatggganggctggtttgttanatgaacagggacataggaggtaggcaccaggatgctaaatca

SEQ ID NO: 211 - DNA, 264 bp, Homo sapien
  misc_feature (1)...(264): n = A,T,C or G
acattgtttttttgagataaagcattgagagagctctccttaacgtgacacaatggaaggactggaacacatacccacatctttgttctgagggataattttctgataaagtcttgctgtatattcaagcacatatgttatatattattcagttccatgtttatagcctagttaaggagaggggagatacattcngaaagaggactgaaagaaatactcaagtnggaaaacagaaaaagaaaaaaaggagcaaatgagaagcct

SEQ ID NO: 212 - DNA, 328 bp, Homo sapien
  misc_feature (1)...(328): n = A,T,C or G
acccaaaaatccaatgctgaatatttggcttcattattcccanattctttgattgtcaaaggatttaatgttgtctcagcttgggcacttcagttaggacctaaggatgccagccggcaggtttatatatgcagcaacaatattcaagcgcgacaacaggttattgaacttgcccgccagttnaatttcattcccattgacttgggatccttatcatcagccagagagattgaaaatttacccctacnactctttactctctgganagggccagtggtggtagctataagcttggccacatttttttttcctttattcctttgtcaga

SEQ ID NO: 213 - DNA, 250 bp, Homo sapien
  misc_feature (1)...(250): n = A,T,C or G
acttatgagcagagcgacatatccnagtgtagactgaataaaactgaattctctccagtttaaagcattgctcactgaagggatagaagtgactgccaggagggaaagtaagccaaggctcattatgccaaagganatatacatttcaattctccaaacttcttcctcattccaagagttttcaatatttgcatgaacctgctgataanccatgttaanaaacaaatatctctctnaccttctcatcggt

SEQ ID NO: 214 - DNA, 444 bp, Homo sapien
  misc_feature (1)...(444): n = A,T,C or G
acccagaatccaatgctgaatatttggcttcattattcccagattctttgattgtcaaaggatttaatgttgtctcagcttgggcacttcagttaggacctaaggatgccagccggcaggtttatatatgcagcaacaatattcaagcgcgacaacaggttattgaacttgcccgccagttgaatttcattcccattgacttgggatccttatcatcagccanagagattgaaaatttacccctacgactctttactctctggagagggccagtggtggtagctataagcttggccacatttttttttcctttattcctttgtcagagatgcgattcatccatatgctanaaaccaacagagtgacttttacaaaattcctataganattgtgaataaaaccttacctatagttgccattactttgctctccctaatatacctc

SEQ ID NO: 215 - DNA, 366 bp, Homo sapien
  misc_feature (1)...(366): n = A,T,C or G
acttatgagcagagcgacatatccaagtgtanactgaataaaactgaattctctccagtttaaagcattgctcactgaagggatagaagtgactgccaggagggaaagtaagccaaggctcattatgccaaagganatatacatttcaattctccaaacttcttcctcattccaagagttttcaatatttgcatgaacctgctgataagccatgttgagaaacaaatatctctctgaccttctcatcggtaagcagaggctgtaggcaacatggaccatagcgaanaaaaaacttagtaatccaagctgttttctacactgtaaccaggtttccaaccaaggtggaaatctcctatacttggtgcc

SEQ ID NO: 216 - DNA, 260 bp, Homo sapien
  misc_feature (1)...(260): n = A,T,C or G
ctgtataaacagaactccactgcangagggagggccgggccaggagaatctccgcttgtccaagacaggggcctaaggagggtctccacactgctnntaagggctnttncatttttttattaataaaaagtnnaaaaggcctcttctcaacttttttcccttnggctggaaaatttaaaaatcaaaaatttcctnaagttntcaagctatcatatatactntatcctgaaaaagcaacataattcttccttccctccttt

SEQ ID NO: 217 - DNA, 262 bp, Homo sapien
  misc_feature (1)...(262): n = A,T,C or G
acctacgtgggtaagtttanaaatgttataatttcaggaanaggaacgcatataattgtatcttgcctataattttctattttaataaggaaatagcaaattggggtggggggaatgtagggcattctacagtttgagcaaaatgcaattaaatgtggaaggacagcactgaaaaattttatgaataatctgtatgattatatgtctctagagtagatttataattagccacttaccctaatatccttcatgcttgtaaagt

SEQ ID NO: 218 - DNA, 205 bp, Homo sapien
  misc_feature (1)...(205): n = A,T,C or G
accaaggtggtgcattaccggaantggatcaangacaccatcgtggccaacccctgagcacccctatcaactcccttttgtagtaaacttggaaccttggaaatgaccaggccaagactcaggcctccccagttctactgacctttgtccttangtntnangtccagggttgctaggaaaanaaatcagcagacacaggtgtaaa

SEQ ID NO: 219 - DNA, 114 bp, Homo sapien
tactgttttgtctcagtaacaataaatacaaaaagactggttgtgttccggccccatccaaccacgaagttgatttctcttgtgtgcagagtgactgattttaaaggacatgga

SEQ ID NO: 220 - DNA, 93 bp, Homo sapien
actagccagcacaaaaggcagggtagcctgaattgctttctgctctttacatttcttttaaaataagcatttagtgctcagtccctactgagt

SEQ ID NO: 221 - DNA, 167 bp, Homo sapien
  misc_feature (1)...(167): n = A,T,C or G
actangtgcaggtgcgcacaaatatttgtcgatattcccttcatcttggattccatgaggtcttttgcccagcctgtggctctactgtagtaagtttctgctgatgaggagccagnatgccccccactaccttccctgacgctccccanaaatcacccaacctctgt

SEQ ID NO: 222 - DNA, 351 bp, Homo sapien
agggcgtggtgcggagggcggtactgacctcattagtaggaggatgcattctggcaccccgttcttcacctgtcccccaatccttaaaaggccatactgcataaagtcaacaacagataaatgtttgctgaattaaaggatggatgaaaaaaattaataatgaatttttgcataatccaattttctcttttatatttctagaagaagtttctttgagcctattagatcccgggaatcttttaggtgagcatgattagagagcttgtaggttgcttttacatatatctggcatatttgagtctcgtatcaaaacaatagattggtaaaggtggtattattgtattgataagt

SEQ ID NO: 223 - DNA, 383 bp, Homo sapien
  misc_feature (1)...(383): n = A,T,C or G
aaaacaaacaaacaaaaaaaacaattcttcattcagaaaaattatcttagggactgatattggtaattatggtcaatttaatwrtrttktggggcatttccttacattgtcttgacaagattaaaatgtctgtgccaaaattttgtattttatttggagacttcttatcaaaagtaatgctgccaaaggaagtctaaggaattagtagtgttcccmtcacttgtttggagtgtgctattctaaaagattttgatttcctggaatgacaattatattttaactttggtgggggaaanagttataggaccacagtcttcacttctgatacttgtaaattaatcttttattgcacttgttttgaccattaagctatatgtttaaaa

SEQ ID NO: 224 - DNA, 320 bp, Homo sapien
cccctgaaggcttcttgttagaaaatagtacagttacaaccaataggaacaacaaaaagaaaaagtttgtgacattgtagtagggagtgtgtaccccttactccccatcaaaaaaaaaatggatacatggttaaaggataraagggcaatattttatcatatgttctaaaagagaaggaagagaaaatactactttctcraaatggaagcccttaaaggtgctttgatactgaaggacacaaatgtggccgtccatcctcctttaragttgcatgacttggacacggtaactgttgcagttttaractcmgcattgtgac

SEQ ID NO: 225 - DNA, 1214 bp, Homo sapien
gaggactgcagcccgcactcgcagccctggcaggcggcactggtcatggaaaacgaattgttctgctcgggcgtcctggtgcatccgcagtgggtgctgtcagccgcacactgtttccagaactcctacaccatcgggctgggcctgcacagtcttgaggccgaccaagagccagggagccagatggtggaggccagcctctccgtacggcacccagagtacaacagacccttgctcgctaacgacctcatgctcatcaagttggacgaatccgtgtccgagtctgacaccatccggagcatcagcattgcttcgcagtgccctaccgcggggaactcttgcctcgtttctggctggggtctgctggcgaacggcagaatgcctaccgtgctgcagtgcgtgaacgtgtcggtggtgtctgaggaggtctgcagtaagctctatgacccgctgtaccaccccagcatgttctgcgccggcggagggcaagaccagaaggactcctgcaacggtgactctggggggcccctgatctgcaacgggtacttgcagggccttgtgtctttcggaaaagccccgtgtggccaagttggcgtgccaggtgtctacaccaacctctgcaaattcactgagtggatagagaaaaccgtccaggccagttaactctggggactgggaacccatgaaattgacccccaaatacatcctgcggaaggaattcaggaatatctgttcccagcccctcctccctcaggcccaggagtccaggcccccagcccctcctccctcaaaccaagggtacagatccccagcccctcctccctcagacccaggagtccagaccccccagcccctcctccctcagacccaggagtccagcccctcctccctcagacccaggagtccagaccccccagcccctcctccctcagacccaggggtccaggcccccaacccctcctccctcagactcagaggtccaagcccccaacccctccttccccagacccagaggtccaggtcccagcccctcctccctcagacccagcggtccaatgccacctagactctccctgtacacagtgcccccttgtggcacgttgacccaaccttaccagttggtttttcattttttgtccctttcccctagatccagaaataaagtctaagagaagcgcaaaaaaaaaaaaaaaaaaaaaaaaaaaaaaaaaaaa

SEQ ID NO: 226 - DNA, 119 bp, Homo sapien
acccagtatgtgcagggagacggaaccccatgtgacagcccactccaccagggttcccaaagaacctggcccagtcataatcattcatcctgacagtggcaataatcacgataaccagt

SEQ ID NO: 227 - DNA, 818 bp, Homo sapien
acaattcatagggacgaccaatgaggacagggaatgaacccggctctcccccagccctgatttttgctacatatggggtcccttttcattctttgcaaaaacactgggttttctgagaacacggacggttcttagcacaatttgtgaaatctgtgtaraaccgggctttgcaggggagataattttcctcctctggaggaaaggtggtgattgacaggcagggagacagtgacaaggctagagaaagccacgctcggccttctctgaaccaggatggaacggcagacccctgaaaacgaagcttgtccccttccaatcagccacttctgagaacccccatctaacttcctactggaaaagagggcctcctcaggagcagtccaagagttttcaaagataacgtgacaactaccatctagaggaaagggtgcaccctcagcagagaagccgagagcttaactctggtcgtttccagagacaacctgctggctgtcttgggatgcgcccagcctttgagaggccactaccccatgaacttctgccatccactggacatgaagctgaggacactgggcttcaacactgagttgtcatgagagggacaggctctgccctcaagccggctgagggcagcaaccactctcctcccctttctcacgcaaagccattcccacaaatccagaccataccatgaagcaacgagacccaaacagtttggctcaagaggatatgaggactgtctcagcctggctttgggctgacaccatgcacacacacaaggtccacttctaggttttcagcctagatgggagtcgtgt

SEQ ID NO: 228 - DNA, 744 bp, Homo sapien
actggagacactgttgaacttgatcaagacccagaccaccccaggtctccttcgtgggatgtcatgacgtttgacatacctttggaacgagcctcctccttggaagatggaagaccgtgttcgtggccgacctggcctctcctggcctgtttcttaagatgcggagtcacatttcaatggtaggaaaagtggcttcgtaaaatagaagagcagtcactgtggaactaccaaatggcgagatgctcggtgcacattggggtgctttgggataaaagatttatgagccaactattctctggcaccagattctaggccagtttgttccactgaagcttttcccacagcagtccacctctgcaggctggcagctgaatggcttgccggtggctctgtggcaagatcacactgagatcgatgggtgagaaggctaggatgcttgtctagtgttcttagctgtcacgttggctccttccaggttggccagacggtgttggccactcccttctaaaacacaggcgccctcctggtgacagtgacccgccgtggtatgccttggcccattccagcagtcccagttatgcatttcaagtttggggtttgttcttttcgttaatgttcctctgtgttgtcagctgtcttcatttcctgggctaagcagcattgggagatgtggaccagagatccactccttaagaaccagtggcgaaagacactttctttcttcactctgaagtagctggtggt

SEQ ID NO: 229 - DNA, 300 bp, Homo sapien
cgagtctgggttttgtctataaagtttgatccctccttttctcatccaaatcatgtgaaccattacacatcgaaataaaagaaaggtggcagacttgcccaacgccaggctgacatgtgctgcagggttgttgttttttaattattattgttagaaacgtcacccacagtccctgttaatttgtatgtgacagccaactctgagaaggtcctatttttccacctgcagaggatccagtctcactaggctcctccttgccctcacactggagtctccgccagtgtgggtgcccactgacat

SEQ ID NO: 230 - DNA, 301 bp, Homo sapien
cagcagaacaaatacaaatatgaagagtgcaaagatctcataaaatctatgctgaggaatgagcgacagttcaaggaggagaagcttgcagagcagctcaagcaagctgaggagctcaggcaatataaagtcctggttcacactcaggaacgagagctgacccagttaagggagaagttgcgggaagggagagatgcctccctctcattgaatgagcatctccaggccctcctcactccggatgaaccggacaagtcccaggggcaggacctccaagaaacagacctcggccgcgaccacg

SEQ ID NO: 231 - DNA, 301 bp, Homo sapien
gcaagcacgctggcaaatctctgtcaggtcagctccagagaagccattagtcattttagccaggaactccaagtccacatccttggcaactggggacttgcgcaggttagccttgaggatggcaacacgggacttctcatcaggaagtgggatgtagatgagctgatcaagacggccaggtctgaggatggcaggatcaatgatgtcaggccggttggtaccgccaatgatgaacacatttttttttgtggacatgccatccatttctgtcaggatctggttgatgactcggtcagcagcc

SEQ ID NO: 232 - DNA, 301 bp, Homo sapien
agtaggtatttcgtgagaagttcaacaccaaaactggaacatagttctccttcaagtgttggcgacagcggggcttcctgattctggaatataactttgtgtaaattaacagccacctatagaagagtccatctgctgtgaaggagagacagagaactctgggttccgtcgtcctgtccacgtgctgtaccaagtgctggtgccagcctgttacctgttctcactgaaaatctggctaatgctcttgtgtatcacttctgattctgacaatcaatcaatcaatggcctagagcactgactg

SEQ ID NO: 233 - DNA, 301 bp, Homo sapien
atgactgacttcccagtaaggctctctaaggggtaagtaggaggatccacaggatttgagatgctaaggccccagagatcgtttgatccaaccctcttattttcagaggggaaaatggggcctagaagttacagagcatctagctggtgcgctggcacccctggcctcacacagactcccgagtagctgggactacaggcacacagtcactgaagcaggccctgttagcaattctatgcgtacaaattaacatgagatgagtagagactttattgagaaagcaagagaaaatcctatcaac

SEQ ID NO: 234 - DNA, 301 bp, Homo sapien
aggtcctacacatcgagactcatccatgattgatatgaatttaaaaattacaagcaaagacattttattcatcatgatgctttcttttgtttcttcttttcgttttcttctttttctttttcaatttcagcaacatacttctcaatttcttcaggatttaaaatcttgagggattgatctcgcctcatgacagcaagttcaatgtttttgccacctgactgaaccacttccaggagtgccttgatcaccagcttaatggtcagatcatctgcttcaatggcttcgtcagtatagttcttct

SEQ ID NO: 235 - DNA, 283 bp, Homo sapien
tggggctgtgcatcaggcgggtttgagaaatattcaattctcagcagaagccagaatttgaattccctcatcttttagggaatcatttaccaggtttggagaggattcagacagctcaggtgctttcactaatgtctctgaacttctgtccctctttgttcatggatagtccaataaataatgttatctttgaactgatgctcataggagagaatataagaactctgagtgatatcaacattagggattcaaagaaatattagatttaagctcacactggtca

SEQ ID NO: 236 - DNA, 301 bp, Homo sapien
aggtcctccaccaactgcctgaagcacggttaaaattgggaagaagtatagtgcagcataaatacttttaaatcgatcagatttccctaacccacatgcaatcttcttcaccagaagaggtcggagcagcatcattaataccaagcagaatgcgtaatagataaatacaatggtatatagtgggtagacggcttcatgagtacagtgtactgtggtatcgtaatctggacttgggttgtaaagcatcgtgtaccagtcagaaagcatcaatactcgacatgaacgaatataaagaacacca

SEQ ID NO: 237 - DNA, 301 bp, Homo sapien
cagtggtagtggtggtggacgtggcgttggtcgtggtgccttttttggtgcccgtcacaaactcaatttttgttcgctcctttttggccttttccaatttgtccatctcaattttctgggccttggctaatgcctcatagtaggagtcctcagaccagccatggggatcaaacatatcctttgggtagttggtgccaagctcgtcaatggcacagaatggatcagcttctcgtaaatctagggttccgaaattctttcttcctttggataatgtagttcatatccattccctcctttatct

SEQ ID NO: 238 - DNA, 301 bp, Homo sapien
gggcaggtttttttttttttttttttgatggtgcagacccttgctttatttgtctgacttgttcacagttcagccccctgctcagaaaaccaacgggccagctaaggagaggaggaggcaccttgagacttccggagtcgaggctctccagggttccccagcccatcaatcattttctgcaccccctgcctgggaagcagctccctggggggtgggaatgggtgactagaagggatttcagtgtgggacccagggtctgttcttcacagtaggaggtggaagggatgactaatttctttat

SEQ ID NO: 239 - DNA, 239 bp, Homo sapien
ataagcagctagggaattctttatttagtaatgtcctaacataaaagttcacataactgcttctgtcaaaccatgatactgagctttgtgacaacccagaaataactaagagaaggcaaacataataccttagagatcaagaaacatttacacagttcaactgtttaaaaatagctcaacattcagccagtgagtagagtgtgaatgccagcatacacagtatacaggtccttcaggga

SEQ ID NO: 240 - DNA, 300 bp, Homo sapien
ggtcctaatgaagcagcagcttccacattttaacgcaggtttacggtgatactgtcctttgggatctgccctccagtggaaccttttaaggaagaagtgggcccaagctaagttccacatgctgggtgagccagatgacttctgttccctggtcactttcttcaatggggcgaatgggggctgccaggtttttaaaatcatgcttcatcttgaagcacacggtcacttcaccctcctcacgctgtgggtgtactttgatgaaaatacccactttgttggcctttctgaagctataatgtc

SEQ ID NO: 241 - DNA, 301 bp, Homo sapien
gaggtctggtgctgaggtctctgggctaggaagaggagttctgtggagctggaagccagacctctttggaggaaactccagcagctatgttggtgtctctgagggaatgcaacaaggctgctcctccatgtattggaaaactgcaaactggactcaactggaaggaagtgctgctgccagtgtgaagaaccagcctgaggtgacagaaacggaagcaaacaggaacagccagtcttttcttcctcctcctgtcatacggtctctctcaagcatcctttgttgtcaggggcctaaaagggag

SEQ ID NO: 242 - DNA, 301 bp, Homo sapien
ccgaggtcctgggatgcaaccaatcactctgtttcacgtgacttttatcaccatacaatttgtggcatttcctcattttctacattgtagaatcaagagtgtaaataaatgtatatcgatgtcttcaagaatatatcattcctttttcactagaacccattcaaaatataagtcaagaatcttaatatcaacaaatatatcaagcaaactggaaggcagaataactaccataatttagtataagtacccaaagttttataaatcaaaagccctaatgataaccatttttagaattcaatca

SEQ ID NO: 243 - DNA, 301 bp, Homo sapien
aggtaagtcccagtttgaagctcaaaagatctggtatgagcataggctcatcgacgacatggtggcccaagctatgaaatcagagggaggcttcatctgggcctgtaaaaactatgatggtgacgtgcagtcggactctgtggcccaagggtatggctctctcggcatgatgaccagcgtgctggtttgtccagatggcaagacagtagaagcagaggctgcccacgggactgtaacccgtcactaccgcatgttccagaaaggacaggagacgtccaccaatcccattgcttccattttt

SEQ ID NO: 244 - DNA, 300 bp, Homo sapien
gctggtttgcaagaatgaaatgaatgattctacagctaggacttaaccttgaaatggaaagtcatgcaatcccatttgcaggatctgtctgtgcacatgcctctgtagagagcagcattcccagggaccttggaaacagttgacactgtaaggtgcttgctccccaagacacatcctaaaaggtgttgtaatggtgaaaacgtcttccttctttattgccccttcttatttatgtgaacaactgtttgtcttttgtgtatcttttttaaactgtaaagttcaattgtgaaaatgaatatc

SEQ ID NO: 245 - DNA, 301 bp, Homo sapien
gtctgagtatttaaaatgttattgaaattatccccaaccaatgttagaaaagaaagaggttatatacttagataaaaaatgaggtgaattactatccattgaaatcatgctcttagaattaaggccaggagatattgtcattaatgtaracttcaggacactagagtatagcagccctatgttttcaaagagcagagatgcaattaaatattgtttagcatcaaaaaggccactcaatacagctaataaaatgaaagacctaatttctaaagcaattctttataatttacaaagttttaag

SEQ ID NO: 246 - DNA, 301 bp, Homo sapien
ggtctgtcctacaatgcctgcttcttgaaagaagtcggcactttctagaatagctaaataacctgggcttattttaaagaactatttgtagctcagattggttttcctatggctaaaataagtgcttcttgtgaaaattaaataaaacagttaattcaaagccttgatatatgttaccactaacaatcatactaaatatattttgaagtacaaagtttgacatgctctaaagtgacaacccaaatgtgtcttacaaaacacgttcctaacaaggtatgctttacactaccaatgcagaaac

SEQ ID NO: 247 - DNA, 301 bp, Homo sapien
aggtcctttggcagggctcatggatcagagctcaaactggagggaaaggcatttcgggtagcctaagagggcgactggcggcagcacaaccaaggaaggcaaggttgtttcccccacgctgtgtcctgtgttcaggtgcgacacacaatcctcatgggaacaggatcacccatgcgctgcccttgatgatcaaggttggggcttaagtggattaagggaggcaagttctgggttccttgccttttcaaaccatgaagtcaggctctgtatccctccttttcctaactgatattctaactaa

SEQ ID NO: 248 - DNA, 301 bp, Homo sapien
aggtccttggagatgccatttcagccgaaggactcttctwttcggaagtacaccctcactattaggaagattcttaggggtaatttttctgaggaaggagaactagccaacttaagaattacaggaagaaagtggtttggaagacagccaaagaaataaaagcagattaaattgtatcaggtacattccagcctgttggcaactccataaaaacatttcagattttaatcccgaatttagctaatgagactggatttttgttttttatgttgtgtgtcgcagagctaaaaactcagttccc

SEQ ID NO: 249 - DNA, 301 bp, Homo sapien
gtccagaggaagcacctggtgctgaactaggcttgccctgctgtgaacttgcacttggagccctgacgctgctgttctccccgaaaaacccgaccgacctccgcgatctccgtcccgcccccagggagacacagcagtgactcagagctggtcgcacactgtgcctccctcctcaccgcccatcgtaatgaattattttgaaaattaattccaccatcctttcagattctggatggaaagactgaatctttgactcagaattgtttgctgaaaagaatgatgtgactttcttagtcattta

SEQ ID NO: 250 - DNA, 301 bp, Homo sapien
ggtctgtgacaaggacttgcaggctgtgggaggcaagtgacccttaacactacacttctccttatctttattggcttgataaacataattatttctaacactagcttatttccagttgcccataagcacatcagtacttttctctggctggaatagtaaactaaagtatggtacatctacctaaaagactactatgtggaataatacatactaatgaagtattacatgatttaaagactacaataaaaccaaacatgcttataacattaagaaaaacaataaagatacatgattgaaacca

SEQ ID NO: 251 - DNA, 301 bp, Homo sapien
gccgaggtcctacatttggcccagtttccccctgcatcctctccagggcccctgcctcatagacaacctcatagagcataggagaactggttgccctgggggcagggggactgtctggatggcaggggtcctcaaaaatgccactgtcactgccaggaaatgcttctgagcagtacacctcattgggatcaatgaaaagcttcaagaaatcttcaggctcactctcttgaaggcccggaacctctggaggggggcagtggaatcccagctccaggacggatcctgtcgaaaagatatcctc

SEQ ID NO: 252 - DNA, 301 bp, Homo sapien
gcaaccaatcactctgtttcacgtgacttttatcaccatacaatttgtggcatttcctcattttctacattgtagaatcaagagtgtaaataaatgtatatcgatgtcttcaagaatatatcattcctttttcactaggaacccattcaaaatataagtcaagaatcttaatatcaacaaatatatcaagcaaactggaaggcagaataactaccataatttagtataagtacccaaagttttataaatcaaaagccctaatgataaccatttttagaattcaatcatcactgtagaatca

SEQ ID NO: 253 - DNA, 301 bp, Homo sapien
ttccctaagaagatgttattttgttgggttttgttccccctccatctcgattctcgtacccaactaaaaaaaaaaaataaagaaaaaatgtgctgcgttctgaaaaataactccttagcttggtctgattgttttcagaccttaaaatataaacttgtttcacaagctttaatccatgtggattttttttcttagagaaccacaaaacataaaaggagcaagtcggactgaatacctgtttccatagtgcccacagggtattcctcacattttctccataggaaaatgctttttcccaagg

SEQ ID NO: 254 - DNA, 301 bp, Homo sapien
cgctgcgcctttcccttgggggaggggcaaggccagagggggtccaagtgcagcacgaggaacttgaccaattcccttgaagcgggtgggttaaaccctgtaaatgggaacaaaatccccccaaatctcttcatcttaccctggtggactcctgactgtagaattttttggttgaaacaagaaaaaaataaagctttggacttttcaaggttgcttaacaggtactgaaagactggcctcacttaaactgagccaggaaaagctgcagatttattaatgggtgtgttagtgtgcagtgcct

SEQ ID NO: 255 - DNA, 302 bp, Homo sapien
agctttttttttttttttttttttttttttttcattaaaaaatagtgctctttattataaattactgaaatgtttcttttctgaatataaatataaatatgtgcaaagtttgacttggattgggattttgttgagttcttcaagcatctcctaataccctcaagggcctgagtaggggggaggaaaaaggactggaggtggaatctttataaaaaacaagagtgattgaggcagattgtaaacattattaaaaaacaagaaacaaacaaaaaaatagagaaaaaaaccaccccaacacacaa

SEQ ID NO: 256 - DNA, 301 bp, Homo sapien
  misc_feature (1)...(301): n = A,T,C or G
gttccagaaaacattgaaggtggcttcccaaagtctaactagggataccccctctagcctaggaccctcctccccacacctcaatccaccaaaccatccataatgcacccagataggcccacccccaaaagcctggacaccttgagcacacagttatgaccaggacagactcatctctataggcaaatagctgctggcaaactggcattacctggtttgtggggatgggggggcaagtgtgtggcctctcggcctggttagcaagaacattcagggtaggcctaagttantcgtgttagtt

SEQ ID NO: 257 - DNA, 301 bp, Homo sapien
gttgtggaggaactctggcttgctcattaagtcctactgattttcactatcccctgaatttccccacttatttttgtctttcactatcgcaggccttagaagaggtctacctgcctccagtcttacctagtccagtctaccccctggagttagaatggccatcctgaagtgaaaagtaatgtcacattactcccttcagtgatttcttgtagaagtgccaatccctgaatgccaccaagatcttaatcttcacatctttaatcttatctctttgactcctctttacaccggagaaggctcc

SEQ ID NO: 258 - DNA, 301 bp, Homo sapien
  misc_feature (1)...(301): n = A,T,C or G
cagcagtagtagatgccgtatgccagcacgcccagcactcccaggatcagcaccagcaccaggggcccagccaccaggcgcagaagcaagataaacagtaggctcaagaccagagccacccccagggcaacaagaatccaataccaggactgggcaaaatcttcaaagatcttaacactgatgtctcgggcattgaggctgtcaataanacgctgatcccctgctgtatggtggtgtcattggtgatccctgggagcgccggtggagtaacgttggtccatggaaagcagcgcccacaact

SEQ ID NO: 259 - DNA, 301 bp, Homo sapien
  misc_feature (1)...(301): n = A,T,C or G
tcatatatgcaaacaaatgcagactangcctcaggcagagactaaaggacatctcttggggtgtcctgaagtgatttggacccctgagggcagacacctaagtaggaatcccagtgggaagcaaagccataaggaagcccaggattccttgtgatcaggaagtgggccaggaaggtctgttccagctcacatctcatctgcatgcagcacggaccggatgcgcccactgggtcttggcttccctcccatcttctcaagcagtgtccttgttgagccatttgcatccttggctccaggtggc

SEQ ID NO: 260 - DNA, 301 bp, Homo sapien
ttttttttctccctaaggaaaaagaaggaacaagtctcataaaaccaaataagcaatggtaaggtgtcttaacttgaaaaagattaggagtcactggtttacaagttataattgaatgaaagaactgtaacagccacagttggccatttcatgccaatggcagcaaacaacaggattaactagggcaaaataaataagtgtgtggaagccctgataagtgcttaataaacagactgattcactgagacatcagtacctgcccgggcggccgctcgagccgaattctgcagatatccatcac

SEQ ID NO: 261 - DNA, 301 bp, Homo sapien
aaatattcgagcaaatcctgtaactaatgtgtctccataaaaggctttgaactcagtgaatctgcttccatccacgattctagcaatgacctctcggacatcaaagctcctcttaaggttagcaccaactattccatacaattcatcagcaggaaataaaggctcttcagaaggttcaatggtgacatccaatttcttctgataatttagattcctcacaaccttcctagttaagtgaagggcatgatgatcatccaaagcccagtggtcacttactccagactttctgcaatgaagatca

SEQ ID NO: 262 - DNA, 301 bp, Homo sapien
gaggagagcctgttacagcatttgtaagcacagaatactccaggagtatttgtaattgtctgtgagcttcttgccgcaagtctctcagaaatttaaaaagatgcaaatccctgagtcacccctagacttcctaaaccagatcctctggggctggaacctggcactctgcatttgtaatgagggctttctggtgcacacctaattttgtgcatctttgccctaaatcctggattagtgccccatcattacccccacattataatgggatagattcagagcagatactctccagcaaagaatc

SEQ ID NO: 263 - DNA, 301 bp, Homo sapien
  misc_feature (1)...(301): n = A,T,C or G
tttagcttgtggtaaatgactcacaaaactgattttaaaatcaagttaatgtgaattttgaaaattactacttaatcctaattcacaataacaatggcattaaggtttgacttgagttggttcttagtattatttatggtaaataggctcttaccacttgcaaataactggccacatcattaatgactgacttcccagtaaggctctctaaggggtaagtangaggatccacaggatttgagatgctaaggccccagagatcgtttgatccaaccctcttattttcagaggggaaaatggg

SEQ ID NO: 264 - DNA, 301 bp, Homo sapien
aaagacgttaaaccactctactaccacttgtggaactctcaaagggtaaatgacaaasccaatgaatgactctaaaaacaatatttacatttaatggtttgtagacaataaaaaaacaaggtggatagatctagaattgtaacattttaagaaaaccatascatttgacagatgagaaagctcaattatagatgcaaagttataactaaactactatagtagtaaagaaatacatttcacacccttcatataaattcactatcttggcttgaggcactccataaaatgtatcacgtgcata

SEQ ID NO: 265 - DNA, 301 bp, Homo sapien
tgcccaagttatgtgtaagtgtatccgcacccagaggtaaaactacactgtcatctttgtcttcttgtgacgcagtatttcttctctggggagaagccgggaagtcttctcctggctctacatattcttggaagtctctaatcaacttttgttccatttgtttcatttcttcaggagggattttcagtttgtcaacatgttctctaacaacacttgcccatttctgtaaagaatccaaagcagtccaaggctttgacatgtcaacaaccagcataactagagtatccttcagagatacggc

SEQ ID NO: 266 - DNA, 301 bp, Homo sapien
taccgtctgcccttcctcccatccaggccatctgcgaatctacatgggtcctcctattcgacaccagatcactctttcctctacccacaggcttgctatgagcaagagacacaacctcctctcttctgtgttccagcttcttttcctgttcttcccaccccttaagttctattcctggggatagagacaccaatacccataacctctctcctaagcctccttataacccagggtgcacagcacagactcctgacaactggtaaggccaatgaactgggagctcacagctggctgtgcctga

SEQ ID NO: 267 - DNA, 301 bp, Homo sapien
aaagagcacaggccagctcagcctgccctggccatctagactcagcctggctccatgggggttctcagtgctgagtccatccaggaaaagctcacctagaccttctgaggctgaatcttcatcctcacaggcagcttctgagagcctgatattcctagccttgatggtctggagtaaagcctcattctgattcctctccttcttttctttcaagttggctttcctcacatccctctgttcaattcgcttcagcttgtctgctttagccctcatttccagaagcttcttctctttggcatct

SEQ ID NO: 268 - DNA, 301 bp, Homo sapien
aatgtctcactcaactacttcccagcctaccgtggcctaattctgggagttttcttcttagatcttgggagagctggttcttctaaggagaaggaggaaggacagatgtaactttggatctcgaagaggaagtctaatggaagtaattagtcaacggtccttgtttagactcttggaatatgctgggtggctcagtgagcccttttggagaaagcaagtattattcttaaggagtaaccacttcccattgttctactttctaccatcatcaattgtatattatgtattctttggagaacta

SEQ ID NO: 269 - DNA, 301 bp, Homo sapien
taacaatatacactagctatctttttaactgtccatcattagcaccaatgaagattcaataaaattacctttattcacacatctcaaaacaattctgcaaattcttagtgaagtttaactatagtcacagaccttaaatattcacattgttttctatgtctactgaaaataagttcactacttttctggatattctttacaaaatcttattaaaattcctggtattatcacccccaattatacagtagcacaaccaccttatgtagtttttacatgatagctctgtagaagtttcacatct

SEQ ID NO: 270 - DNA, 301 bp, Homo sapien
cattgaagagcttttgcgaaacatcagaacacaagtgcttataaaattaattaagccttacacaagaatacatattccttttatttctaaggagttaaacatagatgtagctgatgtggagagcttgctggtgcagtgcatattggataacactattcatggccgaattgatcaagtcaaccaactccttgaactggatcatcagaagaagggtggtgcacgatatactgcactagataatggaccaaccaactaaattctctcaccaggctgtatcagtaaactggcttaacagaaaaca

SEQ ID NO: 271 - DNA, 301 bp, Homo sapien
  misc_feature (1)...(301): n = A,T,C or G
aaaaggttctcataagattaacaatttaaataaatatttgatagaacattctttctcatttttatagctcatctttagggttgatattcagttcatgcttcccttgctgttcttgatccagaattgcaatcacttcatcagcctgtattcgctccaattctctataaagtgggtccaaggtgaaccacagagccacagcacacctctttcccttggtgactgccttcaccccatganggttctctcctccagatganaactgatcatgcgcccacattttgggttttatagaagcagtcac

SEQ ID NO: 272 - DNA, 301 bp, Homo sapien
taaattgctaagccacagataacaccaatcaaatggaacaaatcactgtcttcaaatgtcttatcagaaaaccaaatgagcctggaatcttcataatacctaaacatgccgtatttaggatccaataattccctcatgatgagcaagaaaaattctttgcgcacccctcctgcatccacagcatcttctccaacaaatataaccttgagtggcttcttgtaatctatgttctttgttttcctaaggacttccattgcatctcctacaatattttctctacgcaccactagaattaagcagg

SEQ ID NO: 273 - DNA, 301 bp, Homo sapien
  misc_feature (1)...(301): n = A,T,C or G
acatgtgtgtatgtgtatctttgggaaaanaanaagacatcttgtttaytatttttttggagagangctgggacatggataatcacwtaatttgctaytatyactttaatctgactygaagaaccgtctaaaaataaaatttaccatgtcdtatattccttatagtatgcttatttcaccttytttctgtccagagagagtatcagtgacananatttmagggtgaamacatgmattggtgggacttntytttacngagmaccctgcccgsgcgccctcgmakcnganttccgcsananct

SEQ ID NO: 274 - DNA, 301 bp, Homo sapien
  misc_feature (1)...(301): n = A,T,C or G
cttatatactctttctcagaggcaaaagaggagatgggtaatgtagacaattctttgaggaacagtaaatgattattagagagaangaatggaccaaggagacagaaattaacttgtaaatgattctctttggaatctgaatgagatcaagaggccagctttagcttgtggaaaagtccatctaggtatggttgcattctcgtcttcttttctgcagtagataatgaggtaaccgaaggcaattgtgcttcttttgataagaagctttcttggtcatatcaggaaattccaganaaagtcc

SEQ ID NO: 275 - DNA, 301 bp, Homo sapien
  misc_feature (1)...(301): n = A,T,C or G
tcggtgtcagcagcacgtggcattgaacattgcaatgtggagcccaaaccacagaaaatggggtgaaattggccaactttctattaacttatgttggcaattttgccaccaacagtaagctggcccttctaataaaagaaaattgaaaggtttctcactaaacggaattaagtagtggagtcaagagactcccaggcctcagcgtacctgcccgggcggccgctcgaagccgaattctgcagatatccatcacactggcggncgctcgancatgcatctagaaggnccaattcgccctata

SEQ ID NO: 276 - DNA, 301 bp, Homo sapien
tgtacacatactcaataaataaatgactgcattgtggtattattactatactgattatatttatcatgtgacttctaattagaaaatgtatccaaaagcaaaacagcagatatacaaaattaaagagacagaagatagacattaacagataaggcaacttatacattgagaatccaaatccaatacatttaaacatttgggaaatgagggggacaaatggaagccagatcaaatttgtgtaaaactattcagtatgtttcccttgcttcatgtctgagaaggctctccttcaatggggatg

SEQ ID NO: 277 - DNA, 301 bp, Homo sapien
  misc_feature (1)...(301): n = A,T,C or G
tttgttgatgtcagtattttattacttgcgttatgagtgctcacctgggaaattctaaagatacagaggacttggaggaagcagagcaactgaatttaatttaaaagaaggaaaacattggaatcatggcactcctgatactttcccaaatcaacactctcaatgccccaccctcgtcctcaccatagtggggagactaaagtggccacggatttgccttangtgtgcagtgcgttctgagttcnctgtcgattacatctgaccagtctcctttttccgaagtccntccgttcaatcttgc

SEQ ID NO: 278 - DNA, 301 bp, Homo sapien
  misc_feature (1)...(301): n = A,T,C or G
taccactacactccagcctgggcaacagagcaagacctgtctcaaagcataaaatggaataacatatcaaatgaaacagggaaaatgaagctgacaatttatggaagccagggcttgtcacagtctctactgttattatgcattacctgggaatttatataagcccttaataataatgccaatgaacatctcatgtgtgctcacaatgttctggcactattataagtgcttcacaggttttatgtgttcttcgtaactttatggantaggtactcggccgcgaacacgctaagccgaattc

SEQ ID NO: 279 - DNA, 301 bp, Homo sapien
  misc_feature (1)...(301): n = A,T,C or G
aaagcaggaatgacaaagcttgcttttctggtatgttctaggtgtattgtgacttttactgttatattaattgccaatataagtaaatatagattatatatgtatagtgtttcacaaagcttagacctttaccttccagccaccccacagtgcttgatatttcagagtcagtcattggttatacatgtgtagttccaaagcacataagctagaanaanaaatatttctagggagcactaccatctgttttcacatgaaatgccacacacatagaactccaacatcaatttcattgcacaga

SEQ ID NO: 280 - DNA, 301 bp, Homo sapien
ggtactggagttttcctcccctgtgaaaacgtaactactgttgggagtgaattgaggatgtagaaaggtggtggaaccaaattgtggtcaatggaaataggagaatatggttctcactcttgagaaaaaaacctaagattagcccaggtagttgcctgtaacttcagtttttctgcctgggtttgatatagtttagggttggggttagattaagatctaaattacatcaggacaaagagacagactattaactccacagttaattaaggaggtatgttccatgtttatttgttaaagcagt

SEQ ID NO: 281 - DNA, 301 bp, Homo sapien
aggtacaagaaggggaatgggaaagagctgctgctgtggcattgttcaacttggatattcgccgagcaatccaaatcctgaatgaaggggcatcttctgaaaaaggagatctgaatctcaatgtggtagcaatggctttatcgggttatacggatgagaagaactccctttggagagaaatgtgtagcacactgcgattacagctaaataacccgtatttgtgtgtcatgtttgcatttctgacaagtgaaacaggatcttacgatggagttttgtatgaaaacaaagttgcagtacctcg

SEQ ID NO: 282 - DNA, 301 bp, Homo sapien
caggtactacagaattaaaatactgacaagcaagtagtttcttggcgtgcacgaattgcatccagaacccaaaaattaagaaattcaaaaagacattttgtgggcacctgctagcacagaagcgcagaagcaaagcccaggcagaaccatgctaaccttacagctcagcctgcacagaagcgcagaagcaaagcccaggcagaaccatgctaaccttacagctcagcctgcacagaagcgcagaagcaaagcccaggcagaacatgctaaccttacagctcagcctgcacagaagcacaga

SEQ ID NO: 283 - DNA, 301 bp, Homo sapien
atctgtatacggcagacaaactttataragtgtagagaggtgagcgaaaggatgcaaaagcactttgagggctttataataatatgctgcttgaaaaaaaaaatgtgtagttgatactcagtgcatctccagacatagtaaggggttgctctgaccaatcaggtgatcattttttctatcacttcccaggttttatgcaaaaattttgttaaattctataatggtgatatgcatcttttaggaaacatatacatttttaaaaatctattttatgtaagaactgacagacgaatttgctttg

SEQ ID NO: 284 - DNA, 301 bp, Homo sapien
caggtacaaaacgctattaagtggcttagaatttgaacatttgtggtctttatttactttgcttcgtgtgtgggcaaagcaacatcttccctaaatatatattaccaagaaaagcaagaagcagattaggtttttgacaaaacaaacaggccaaaagggggctgacctggagcagagcatggtgagaggcaaggcatgagagggcaagtttgttgtggacagatctgtgcctactttattactggagtaaaagaaaacaaagttcattgatgtcgaaggatatatacagtgttagaaatta

SEQ ID NO: 285 - DNA, 301 bp, Homo sapien
  misc_feature (1)...(301): n = A,T,C or G
acatcaccatgatcggatcccccacccattatacgttgtatgtttacataaatactcttcaatgatcattagtgttttaaaaaaaatactgaaaactccttctgcatcccaatctctaaccaggaaagcaaatgctatttacagacctgcaagccctccctcaaacnaaactatttctggattaaatatgtctgacttcttttgaggtcacacgactaggcaaatgctatttacgatctgcaaaagctgtttgaagagtcaaagcccccatgtgaacacgatttctggaccctgtaacagt

SEQ ID NO: 286 - DNA, 301 bp, Homo sapien
taccactgcattccagcctgggtgacagagtgagactccgtctccaaaaaaaactttgcttgtatattatttttgccttacagtggatcattctagtaggaaaggacagtaagattttttatcaaaatgtgtcatgccagtaagagatgttatattcttttctcatttcttccccacccaaaaataagctaccatatagcttataagtctcaaatttttgccttttactaaaatgtgattgtttctgttcattgtgtatgcttcatcacctatattaggcaaattccattttttcccttgt

SEQ ID NO: 287 - DNA, 301 bp, Homo sapien
tacagatctgggaactaaatattaaaaatgagtgtggctggatatatggagaatgttgggcccagaaggaacgtagagatcagatattacaacagctttgttttgagggttagaaatatgaaatgatttggttatgaacgcacagtttaggcagcagggccagaatcctgaccctctgccccgtggttatctcctccccagcttggctgcctcatgttatcacagtattccattttgtttgttgcatgtcttgtgaagccatcaagattttctcgtctgttttcctctcattggtaatgct

SEQ ID NO: 288 - DNA, 301 bp, Homo sapien
gtacacctaactgcaaggacagctgaggaatgtaatgggcagccgcttttaaagaagtagagtcaataggaagacaaattccagttccagctcagtctgggtatctgcaaagctgcaaaagatctttaaagacaatttcaagagaatatttccttaaagttggcaatttggagatcatacaaaagcatctgcttttgtgatttaatttagctcatctggccactggaagaatccaaacagtctgccttaattttggatgaatgcatgatggaaattcaataatttagaaagttaaaaaaaa

SEQ ID NO: 289 - DNA, 301 bp, Homo sapien
  misc_feature (1)...(301): n = A,T,C or G
ggtacactgtttccatgttatgtttctacacattgctacctcagtgctcctggaaacttagcttttgatgtctccaagtagtccaccttcatttaactctttgaaactgtatcatctttgccaagtaagagtggtggcctatttcagctgctttgacaaaatgactggctcctgacttaacgttctataaatgaatgtgctgaagcaaagtgcccatggtggcggcgaanaagagaaagatgtgttttgttttggactctctgtggtcccttccaatgctgtgggtttccaaccagnggaa

SEQ ID NO: 290 - DNA, 301 bp, Homo sapien
  misc_feature (1)...(301): n = A,T,C or G
acactgagctcttcttgataaatatacagaatgcttggcatatacaagattctatactactgactgatctgttcatttctctcacagctcttacccccaaaagcttttccaccctaagtgttctgacctccttttctaatcacagtagggatagaggcaganccacctacaatgaacatggagttctatcaagaggcagaaacagcacagaatcccagttttaccattcgctagcagtgctgccttgaacaaaaacatttctccatgtctcattttcttcatgcctcaagtaacagtgaga

SEQ ID NO: 291 - DNA, 301 bp, Homo sapien
caggtaccaatttcttctatcctagaaacatttcattttatgttgttgaaacataacaactatatcagctagattttttttctatgctttacctgctatggaaaatttgacacattctgctttactcttttgtttataggtgaatcacaaaatgtatttttatgtattctgtagttcaatagccatggctgtttacttcatttaatttatttagcataaagacattatgaaaaggcctaaacatgagcttcacttccccactaactaattagcatctgttatttcttaaccgtaatgccta

SEQ ID NO: 292 - DNA, 301 bp, Homo sapien
  misc_feature (1)...(301): n = A,T,C or G
accttttagtagtaatgtctaataataaataagaaatcaattttataaggtccatatagctgtattaaataatttttaagtttaaaagataaaataccatcattttaaatgttggtattcaaaaccaaagnatataaccgaaaggaaaaacagatgagacataaaatgatttgcnagatgggaaatatagtasttyatgaatgttnattaaattccagttataatagtggctacacactctcactacacacacagaccccacagtcctatatgccacaaacacatttccataacttgaaaa

SEQ ID NO: 293 - DNA, 301 bp, Homo sapien
ggtaccaagtgctggtgccagcctgttacctgttctcactgaaaagtctggctaatgctcttgtgtagtcacttctgattctgacaatcaatcaatcaatggcctagagcactgactgttaacacaaacgtcactagcaaagtagcaacagctttaagtctaaatacaaagctgttctgtgtgagaattttttaaaaggctacttgtataataacccttgtcatttttaatgtacctcggccgcgaccacgctaagccgaattctgcagatatccatcacactggcggccgctcgagcatg

SEQ ID NO: 294 - DNA, 301 bp, Homo sapien
  misc_feature (1)...(301): n = A,T,C or G
tgacccataacaatatacactagctatctttttaactgtccatcattagcaccaatgaagattcaataaaattacctttattcacacatctcaaaacaattctgcaaattcttagtgaagtttaactatagtcacagancttaaatattcacattgttttctatgtctactgaaaataagttcactacttttctgggatattctttacaaaatcttattaaaattcctggtattatcacccccaattatacagtagcacaaccaccttatgtagtttttacatgatagctctgtagaggtt

SEQ ID NO: 295 - DNA, 305 bp, Homo sapien
gtactctttctctcccctcctctgaatttaattctttcaacttgcaatttgcaaggattacacatttcactgtgatgtatattgtgttgcaaaaaaaaaagtgtctttgtttaaaattacttggtttgtgaatccatcttgctttttccccattggaactagtcattaacccatctctgaactggtagaaaaacrtctgaagagctagtctatcagcatctgacaggtgaattggatggttctcagaaccatttcacccagacagcctgtttctatcctgtttaataaattagtttgggttctct

SEQ ID NO: 296 - DNA, 301 bp, Homo sapien
aggtactatgggaagctgctaaaataatatttgatagtaaaagtatgtaatgtgctatctcacctagtagtaaactaaaaataaactgaaactttatggaatctgaagttattttccttgattaaatagaattaataaaccaatatgaggaaacatgaaaccatgcaatctactatcaactttgaaaaagtgattgaacgaaccacttagctttcagatgatgaacactgataagtcatttgtcattactataaattttaaaatctgttaataagatggcctatagggaggaaaaaggggc

SEQ ID NO: 297 - DNA, 300 bp, Homo sapien
  misc_feature (1)...(300): n = A,T,C or G
actgagttttaactggacgccaagcaggcaaggctggaaggttttgctctctttgtgctaaaggttttgaaaaccttgaaggagaatcattttgacaagaagtacttaagagtctagagaacaaagangtgaaccagctgaaagctctcgggggaancttacatgtgttgttaggcctgttccatcattgggagtgcactggccatccctcaaaatttgtctgggctggcctgagtggtcaccgcacctcggccgcgaccacgctaagccgaattctgcagatatccatcacactggcgg

SEQ ID NO: 298 - DNA, 301 bp, Homo sapien
  misc_feature (1)...(301): n = A,T,C or G
tatggggtttgtcacccaaaagctgatgctgagaaaggcctccctggggcccctcccgcgggcatctgagagacctggtgttccagtgtttctggaaatgggtcccagtgccgccggctgtgaagctctcagatcaatcacgggaagggcctggcggtggtggccacctggaaccaccctgtcctgtctgtttacatttcactaycaggttttctctgggcattacnatttgttcccctacaacagtgacctgtgcattctgctgtggcctgctgtgtctgcaggtggctctcagcgaggt

SEQ ID NO: 299 - DNA, 301 bp, Homo sapien
gttttgagacggagtttcactcttgttgcccagactggactgcaatggcagggtctctgctcactgcaccctctgcctcccaggttcgagcaattctcctgcctcagcctcccaggtagctgggattgcaggctcacgccaccatacccagctaatttttttgtatttttagtagagacggagtttcgccatgttggccagctggtctcaaactcctgacctcaagcgacctgcctgcctcggcctcccaaagtgctggaattataggcatgagtcaacacgcccagcctaaagatatttt

SEQ ID NO: 300 - DNA, 301 bp, Homo sapien
attcagttttatttgctgccccagtatctgtaaccaggagtgccacaaaatcttgccagatatgtcccacacccactgggaaaggctcccacctggctacttcctctatcagctgggtcagctgcattccacaaggttctcagcctaatgagtttcactacctgccagtctcaaaacttagtaaagcaagaccatgacattcccccacggaaatcagagtttgccccaccgtcttgttactataaagcctgcctctaacagtccttgcttcttcacaccaatcccgagcgcatcccccatg

SEQ ID NO: 301 - DNA, 301 bp, Homo sapien
ttaaatttttgagaggataaaaaggacaaataatctagaaatgtgtcttcttcagtctgcagaggaccccaggtctccaagcaaccacatggtcaagggcatgaataattaaaagttggtgggaactcacaaagaccctcagagctgagacacccacaacagtgggagctcacaaagaccctcagagctgagacacccacaacagtgggagctcacaaagaccctcagagctgagacacccacaacagcacctcgttcagctgccacatgtgtgaataaggatgcaatgtccagaagtgtt

SEQ ID NO: 302 - DNA, 301 bp, Homo sapien
aggtacacatttagcttgtggtaaatgactcacaaaactgattttaaaatcaagttaatgtgaattttgaaaattactacttaatcctaattcacaataacaatggcattaaggtttgacttgagttggttcttagtattatttatggtaaataggctcttaccacttgcaaataactggccacatcattaatgactgacttcccagtaaggctctctaaggggtaagtaggaggatccacaggatttgagatgctaaggccccagagatcgtttgatccaaccctcttattttcagaggg

SEQ ID NO: 303 - DNA, 301 bp, Homo sapien
aggtaccaactgtggaaataggtagaggatcattttttctttccatatcaactaagttgtatattgttttttgacagtttaacacatcttcttctgtcagagattctttcacaatagcactggctaatggaactaccgcttgcatgttaaaaatggtggtttgtgaaatgatcataggccagtaacgggtatgtttttctaactgatcttttgctcgttccaaagggacctcaagacttccatcgattttatatctggggtctagaaaaggagttaatctgttttccctcataaattcacc

SEQ ID NO: 304 - DNA, 301 bp, Homo sapien
acatggatgttattttgcagactgtcaacctgaatttgtatttgcttgacattgcctaattattagtttcagtttcagcttacccactttttgtctgcaacatgcaraasagacagtgccctttttagtgtatcatatcaggaatcatctcacattggtttgtgccattactggtgcagtgactttcagccacttgggtaaggtggagttggccatatgtctccactgcaaaattactgattttccttttgtaattaataagtgtgtgtgtgaagattctttgagatgaggtatatatctc

SEQ ID NO: 305 - DNA, 301 bp, Homo sapien
  misc_feature (1)...(301): n = A,T,C or G
gangtacagcgtggtcaaggtaacaagaagaaaaaaatgtgagtggcatcctgggatgagcagggggacagacctggacagacacgttgtcatttgctgctgtgggtaggaaaatgggcgtaaaggaggagaaacagatacaaaatctccaactcagtattaaggtattctcatgcctagaatattggtagaaacaagaatacattcatatggcaaataactaaccatggtggaacaaaattctgggatttaagttggataccaangaaattgtattaaaagagctgttcatggaataaga

SEQ ID NO: 306 - protein, 8 aa, Homo sapien
VLGWVAEL

SEQ ID NO: 307 - DNA, 637 bp, Homo sapien
acagggratgaagggaaagggagaggatgaggaagcccccctggggatttggtttggtccttgtgatcaggtggtctatggggcttatccctacaaagaagaatccagaaataggggcacattgaggaatgatacttgagcccaaagagcattcaatcattgttttatttgccttmttttcacaccattggtgagggagggattaccaccctggggttatgaagatggttgaacaccccacacatagcaccggagatatgagatcaacagtttcttagccatagagattcacagcccagagcaggaggacgcttgcacaccatgcaggatgacatgggggatgcgctcgggattggtgtgaagaagcaaggactgttagaggcaggctttatagtaacaagacggtggggcaaactctgatttccgtgggggaatgtcatggtcttgctttactaagttttgagactggcaggtagtgaaactcattaggctgagaaccttgtggaatgcacttgacccasctgatagaggaagtagccaggtgggagcctttcccagtgggtgtgggacatatctggcaagattttgtggcactcctggttacagatactggggcagcaaataaaactgaatcttg

SEQ ID NO: 308 - DNA, 647 bp, Homo sapien
  misc_feature (1)...(647): n = A,T,C or G
acgattttcattatcatgtaaatcgggtcactcaaggggccaaccacagctgggagccactgctcaggggaaggttcatatgggactttctactgcccaaggttctatacaggatataaaggngcctcacagtatagatctggtagcaaagaagaagaaacaaacactgatctctttctgccacccctctgaccctttggaactcctctgaccctttagaacaagcctacctaatatctgctagagaaaagaccaacaacggcctcaaaggatctcttaccatgaaggtctcagctaattcttggctaagatgtgggttccacattaggttctgaatatggggggaagggtcaatttgctcattttgtgtgtggataaagtcaggatgcccaggggccagagcagggggctgcttgctttgggaacaatggctgagcatataaccataggttatggggaacaaaacaacatcaaagtcactgtatcaattgccatgaagacttgagggacctgaatctaccgattcatcttaaggcagcaggaccagtttgagtggcaacaatgcagcagcagaatcaatggaaacaacagaatgattgcaatgtccttttttttctcctgcttctgacttgataaaaggggaccgt

SEQ ID NO: 309 - DNA, 460 bp, Homo sapien
actttatagtttaggctggacattggaaaaaaaaaaaagccagaacaacatgtgatagataatatgattggctgcacacttccagactgatgaatgatgaacgtgatggactattgtatggagcacatcttcagcaagagggggaaatactcatcatttttggccagcagttgtttgatcaccaaacatcatgccagaatactcagcaaaccttcttagctcttgagaagtcaaagtccgggggaatttattcctggcaattttaattggactccttatgtgagagcagcggctacccagctggggtggtggagcgaacccgtcactagtggacatgcagtggcagagctcctggtaaccacctagaggaatacacaggcacatgtgtgatgccaagcgtgacacctgtagcactcaaatttgtcttgtttttgtctttcggtgtgtaagattcttaagt

SEQ ID NO: 310 - DNA, 539 bp, Homo sapien
acgggacttatcaaataaagataggaaaagaagaaaactcaaatattataggcagaaatgctaaaggttttaaaatatgtcaggattggaagaaggcatggataaagaacaaagttcagttaggaaagagaaacacagaaggaagagacacaataaaagtcattatgtattctgtgagaagtcagacagtaagatttgtgggaaatgggttggtttgttgtatggtatgtattttagcaataatctttatggcagagaaagctaaaatcctttagcttgcgtgaatgatcacttgctgaattcctcaaggtaggcatgatgaaggagggtttagaggagacacagacacaatgaactgacctagatagaaagccttagtatactcagctaggaatagtgattctgagggcacactgtgacatgattatgtcattacatgtatggtagtgatggggatgataggaaggaagaacttatggcatattttcacccccacaaaagtcagttaaatattgggacactaaccatccaggtcaaga

SEQ ID NO: 311 - DNA, 526 bp, Homo sapien
  misc_feature (1)...(526): n = A,T,C or G
caaatttgagccaatgacatagaattttacaaatcaagaagcttattctggggccatttcttttgacgttttctctaaactactaaagaggcattaatgatccataaattatattatctacatttacagcatttaaaatgtgttcagcatgaaatattagctacaggggaagctaaataaattaaacatggaataaagatttgtccttaaatataatctacaagaagactttgatatttgtttttcacaagtgaagcattcttataaagtgtcataacctttttggggaaactatgggaaaaaatggggaaactctgaagggttttaagtatcttacctgaagctacagactccataacctctctttacagggagctcctgcagcccctacagaaatgagtggctgagattcttgattgcacagcaagagcttctcatctaaaccctttccctttttagtatctgtgtatcaagtataaaagttctataaactgtagtntacttattttaatccccaaagcacagt

SEQ ID NO: 312 - DNA, 500 bp, Homo sapien
  misc_feature (1)...(500): n = A,T,C or G
cctctctctccccaccccctgactctagagaactgggttttctcccagtactccagcaattcatttctgaaagcagttgagccactttattccaaagtacactgcagatgttcaaactctccatttctctttcccttccacctgccagttttgctgactctcaacttgtcatgagtgtaagcattaaggacattatgcttcttcgattctgaagacaggccctgctcatggatgactctggcttcttaggaaaatatttttcttccaaaatcagtaggaaatctaaacttatcccctctttgcagatgtctagcagcttcagacatttggttaagaacccatgggaaaaaaaaaaatccttgctaatgtggtttcctttgtaaaccangattcttatttgnctggtatagaatatcagctctgaacgtgtggtaaagatttttgtgtttgaatataggagaaatcagtttgctgaaaagttagtcttaattatctattgg

SEQ ID NO: 313 - DNA, 718 bp, Homo sapien
  misc_feature (1)...(718): n = A,T,C or G
ggagatttgtgtggtttgcagccgagggagaccaggaagatctgcatggtgggaaggacctgatgatacagaggtgagaaataagaaaggctgctgactttaccatctgaggccacacatctgctgaaatggagataattaacatcactagaaacagcaagatgacaatataatgtctaagtagtgacatgtttttgcacatttccagcccttttaaatatccacacacacaggaagcacaaaaggaagcacagagatccctgggagaaatgcccggccgccatcttgggtcatcgatgagcctcgccctgtgcctgntcccgcttgtgagggaaggacattagaaaatgaattgatgtgttccttaaaggatggcaggaaaacagatcctgttgtggatatttatttgaacgggattacagatttgaaatgaagtcacaaagtgagcattaccaatgagaggaaaacagacgagaaaatcttgatggttcacaagacatgcaacaaacaaaatggaatactgtgatgacacgagcagccaactggggaggagataccacggggcagaggtcaggattctggccctgctgcctaactgtgcgttataccaatcatttctatttctaccctcaaacaagctgtngaatatctgacttacggttcttntggcccacattttcatnatccaccccntcnttttaannttantccaaantgt

SEQ ID NO: 314 - DNA, 358 bp, Homo sapien
gtttatttacattacagaaaaaacatcaagacaatgtatactatttcaaatatatccatacataatcaaatatagctgtagtacatgttttcattggtgtagattaccacaaatgcaaggcaacatgtgtagatctcttgtcttattcttttgtctataatactgtattgtgtagtccaagctctcggtagtccagccactgtgaaacatgctccctttagattaacctcgtggacgctcttgttgtattgctgaactgtagtgccctgtattttgcttctgtctgtgaattctgttgcttctggggcatttccttgtgatgcagaggaccaccacacagatgacagcaatctgaatt

SEQ ID NO: 315 - DNA, 341 bp, Homo sapien
taccacctccccgctggcactgatgagccgcatcaccatggtcaccagcaccatgaaggcataggtgatgatgaggacatggaatgggcccccaaggatggtctgtccaaagaagcgagtgacccccattctgaagatgtctggaacctctaccagcaggatgatgatagccccaatgacagtcaccagctccccgaccagccggatatcgtccttaggggtcatgtaggcttcctgaagtagcttctgctgtaagagggtgttgtcccgggggctcgtgcggttattggtcctgggcttgagggggcggtagatgcagcacatggtgaagcagatgatgt

SEQ ID NO: 316 - DNA, 151 bp, Homo sapien
agactgggcaagactcttacgccccacactgcaatttggtcttgttgccgtatccatttatgtgggcctttctcgagtttctgattataaacaccactggagcgatgtgttgactggactcattcagggagctctggttgcaatattagtt

SEQ ID NO: 317 - DNA, 151 bp, Homo sapien
agaactagtggatcctaatgaaatacctgaaacatatattggcatttatcaatggctcaaatcttcatttatctctggccttaaccctggctcctgaggctgcggccagcagatcccaggccagggctctgttcttgccacacctgcttga

SEQ ID NO: 318 - DNA, 151 bp, Homo sapien
actggtgggaggcgctgtttagttggctgttttcagaggggtctttcggagggacctcctgctgcaggctggagtgtctttattcctggcgggagaccgcacattccactgctgaggctgtgggggcggtttatcaggcagtgataaacat

SEQ ID NO: 319 - DNA, 151 bp, Homo sapien
aactagtggatccagagctataggtacagtgtgatctcagctttgcaaacacattttctacatagatagtactaggtattaatagatatgtaaagaaagaaatcacaccattaataatggtaagattgggtttatgtgattttagtgggta

SEQ ID NO: 320 - DNA, 150 bp, Homo sapien
aactagtggatccactagtccagtgtggtggaattccattgtgttggggttctagatcgcgagcggctgccctttttttttttttttttgggggggaattttttttttttaatagttattgagtgttctacagcttacagtaaataccat

SEQ ID NO: 321 - DNA, 151 bp, Homo sapien
agcaactttgtttttcatccaggttattttaggcttaggatttcctctcacactgcagtttagggtggcattgtaaccagctatggcataggtgttaaccaaaggctgagtaaacatgggtgcctctgagaaatcaaagtcttcatacact

SEQ ID NO: 322 - DNA, 151 bp, Homo sapien
  misc_feature (1)...(151): n = A,T,C or G
atccagcatcttctcctgtttcttgccttcctttttcttcttcttasattctgcttgaggtttgggcttggtcagtttgccacagggcttggagatggtgacagtcttctggcattcggcattgtgcagggctcgcttcanacttccagtt

SEQ ID NO: 323 - DNA, 151 bp, Homo sapien
  misc_feature (1)...(151): n = A,T,C or G
tgaggacttgtkttctttttctttatttttaatcctcttackttgtaaatatattgcctanagactcanttactacccagtttgtggttttwtgggagaaatgtaactggacagttagctgttcaatyaaaaagacacttancccatgtgg

SEQ ID NO: 324 - DNA, 461 bp, Homo sapien
  misc_feature (1)...(461): n = A,T,C or G
acctgtgtggaatttcagctttcctcatgcaaaaggattttgtatccccggcctacttgaagaagtggtcagctaaaggaatccaggttgttggttggactgttaatacctttgatgaaaagagttactacgaatcccatcttggttccagctatatcactgacagcatggtagaagactgcgaacctcacttctagactttcacggtgggacgaaacgggttcagaaactgccaggggcctcatacagggatatcaaaataccctttgtgctacccaggccctggggaatcaggtgactcacacaaatgcaatagttggtcactgcatttttacctgaaccaaagctaaacccggtgttgccaccatgcaccatggcatgccagagttcaacactgttgctcttgaaaattgggtctgaaaaaacgcacaagagcccctgccctgccctagctgangcac

SEQ ID NO: 325 - DNA, 400 bp, Homo sapien
acactgtttccatgttatgtttctacacattgctacctcagtgctcctggaaacttagcttttgatgtctccaagtagtccaccttcatttaactctttgaaactgtatcatctttgccaagtaagagtggtggcctatttcagctgctttgacaaaatgactggctcctgacttaacgttctataaatgaatgtgctgaagcaaagtgcccatggtggcggcgaagaagagaaagatgtgttttgttttggactctctgtggtcccttccaatgctgtgggtttccaaccaggggaagggtcccttttgcattgccaagtgccataaccatgagcactacgctaccatggttctgcctcctggccaagcaggctggtttgcaagaatgaaatgaatgat

SEQ ID NO: 326 - DNA, 1215 bp, Homo sapien
ggaggactgcagcccgcactcgcagccctggcaggcggcactggtcatggaaaacgaattgttctgctcgggcgtcctggtgcatccgcagtgggtgctgtcagccgcacactgtttccagaactcctacaccatcgggctgggcctgcacagtcttgaggccgaccaagagccagggagccagatggtggaggccagcctctccgtacggcacccagagtacaacagacccttgctcgctaacgacctcatgctcatcaagttggacgaatccgtgtccgagtctgacaccatccggagcatcagcattgcttcgcagtgccctaccgcggggaactcttgcctcgtttctggctggggtctgctggcgaacggcagaatgcctaccgtgctgcagtgcgtgaacgtgtcggtggtgtctgaggaggtctgcagtaagctctatgacccgctgtaccaccccagcatgttctgcgccggcggagggcaagaccagaaggactcctgcaacggtgactctggggggcccctgatctgcaacgggtacttgcagggccttgtgtctttcggaaaagccccgtgtggccaagttggcgtgccaggtgtctacaccaacctctgcaaattcactgagtggatagagaaaaccgtccaggccagttaactctggggactgggaacccatgaaattgacccccaaatacatcctgcggaaggaattcaggaatatctgttcccagcccctcctccctcaggcccaggagtccaggcccccagcccctcctccctcaaaccaagggtacagatccccagcccctcctccctcagacccaggagtccagaccccccagcccctcctccctcagacccaggagtccagcccctcctccctcagacccaggagtccagaccccccagcccctcctccctcagacccaggggtccaggcccccaacccctcctccctcagactcagaggtccaagcccccaacccctccttccccagacccagaggtccaggtcccagcccctcctccctcagacccagcggtccaatgccacctagactctccctgtacacagtgcccccttgtggcacgttgacccaaccttaccagttggtttttcattttttgtccctttcccctagatccagaaataaagtctaagagaagcgcaaaaaaaaaaaaaaaaaaaaaaaaaaaaaaaaaaaa

SEQ ID NO: 327 - protein, 220 aa, Homo sapien
EDCSPHSQPWQAALVMENELFCSGVLVHPQWVLSAAHCFQNSYTIGLGLHSLEADQEPGSQMVEASLSVRHPEYNRPLLANDLMLIKLDESVSESDTIRSISIASQCPTAGNSCLVSGWGLLANGRMPTVLQCVNVSVVSEEVCSKLYDPLYHPSMFCAGGGQDQKDSCNGDSGGPLICNGYLQGLVSFGKAPCGQVGVPGVYTNLCKFTEWIEKTVQAS

SEQ ID NO: 328 - DNA, 234 bp, Homo sapien
cgctcgtctctggtagctgcagccaaatcataaacggcgaggactgcagcccgcactcgcagccctggcaggcggcactggtcatggaaaacgaattgttctgctcgggcgtcctggtgcatccgcagtgggtgctgtcagccacacactgtttccagaactcctacaccatcgggctgggcctgcacagtcttgaggccgaccaagagccagggagccagatggtggaggcca

SEQ ID NO: 329 - protein, 77 aa, Homo sapien
LVSGSCSQIINGEDCSPHSQPWQAALVMENELFCSGVLVHPQWVLSATHCFQNSYTIGLGLHSLEADQEPGSQMVEA

SEQ ID NO: 330 - DNA, 70 bp, Homo sapien
cccaacacaatggcccgatcccatccctgactccgccctcaggatcgctcgtctctggtagctgcagcca

SEQ ID NO: 331 - protein, 22 aa, Homo sapien
QHNGPIPSLTPPSGSLVSGSCS

SEQ ID NO: 332 - DNA, 2507 bp, Homo sapien
tggtgccgctgcagccggcagagatggttgagctcatgttcccgctgttgctcctccttctgcccttccttctgtatatggctgcgccccaaatcaggaaaatgctgtccagtggggtgtgtacatcaactgttcagcttcctgggaaagtagttgtggtcacaggagctaatacaggtatcgggaaggagacagccaaagagctggctcagagaggagctcgagtatatttagcttgccgggatgtggaaaagggggaattggtggccaaagagatccagaccacgacagggaaccagcaggtgttggtgcggaaactggacctgtctgatactaagtctattcgagcttttgctaagggcttcttagctgaggaaaagcacctccacgttttgatcaacaatgcaggagtgatgatgtgtccgtactcgaagacagcagatggctttgagatgcacataggagtcaaccacttgggtcacttcctcctaacccatctgctgctagagaaactaaaggaatcagccccatcaaggatagtaaatgtgtcttccctcgcacatcacctgggaaggatccacttccataacctgcagggcgagaaattctacaatgcaggcctggcctactgtcacagcaagctagccaacatcctcttcacccaggaactggcccggagactaaaaggctctggcgttacgacgtattctgtacaccctggcacagtccaatctgaactggttcggcactcatctttcatgagatggatgtggtggcttttctcctttttcatcaagactcctcagcagggagcccagaccagcctgcactgtgccttaacagaaggtcttgagattctaagtgggaatcatttcagtgactgtcatgtggcatgggtctctgcccaagctcgtaatgagactatagcaaggcggctgtgggacgtcagttgtgacctgctgggcctcccaatagactaacaggcagtgccagttggacccaagagaagactgcagcagactacacagtacttcttgtcaaaatgattctccttcaaggttttcaaaacctttagcacaaagagagcaaaaccttccagccttgcctgcttggtgtccagttaaaactcagtgtactgccagattcgtctaaatgtctgtcatgtccagatttactttgcttctgttactgccagagttactagagatatcataataggataagaagaccctcatatgacctgcacagctcattttccttctgaaagaaactactacctaggagaatctaagctatagcagggatgatttatgcaaatttgaactagcttctttgttcacaattcagttcctcccaaccaaccagtcttcacttcaagagggccacactgcaacctcagcttaacatgaataacaaagactggctcaggagcagggcttgcccaggcatggtggatcaccggaggtcagtagttcaagaccagcctggccaacatggtgaaaccccacctctactaaaaattgtgtatatctttgtgtgtcttcctgtttatgtgtgccaagggagtattttcacaaagttcaaaacagccacaataatcagagatggagcaaaccagtgccatccagtctttatgcaaatgaaatgctgcaaagggaagcagattctgtatatgttggtaactacccaccaagagcacatgggtagcagggaagaagtaaaaaaagagaaggagaatactggaagataatgcacaaaatgaagggactagttaaggattaactagccctttaaggattaactagttaaggattaatagcaaaagayattaaatatgctaacatagctatggaggaattgagggcaagcacccaggactgatgaggtcttaacaaaaaccagtgtggcaaaaaaaaaaaaaaaaaaaaaaaaaaatcctaaaaacaaacaaacaaaaaaaacaattcttcattcagaaaaattatcttagggactgatattggtaattatggtcaatttaataatattttggggcatttccttacattgtcttgacaagattaaaatgtctgtgccaaaattttgtattttatttggagacttcttatcaaaagtaatgctgccaaaggaagtctaaggaattagtagtgttcccatcacttgtttggagtgtgctattctaaaagattttgatttcctggaatgacaattatattttaactttggtgggggaaagagttataggaccacagtcttcacttctgatacttgtaaattaatcttttattgcacttgttttgaccattaagctatatgtttagaaatggtcattttacggaaaaattagaaaaattctgataatagtgcagaataaatgaattaatgttttacttaatttatattgaactgtcaatgacaaataaaaattctttttgattattttttgttttcatttaccagaataaaaacgtaagaattaaaagtttgattacaaaaaaaaaaaaaaa

SEQ ID NO: 333 - DNA, 3030 bp, Homo sapien
gcaggcgacttgcgagctgggagcgatttaaaacgctttggattcccccggcctgggtggggagagcgagctgggtgccccctagattccccgcccccgcacctcatgagccgaccctcggctccatggagcccggcaattatgccaccttggatggagccaaggatatcgaaggcttgctgggagcgggaggggggcggaatctggtcgcccactcccctctgaccagccacccagcggcgcctacgctgatgcctgctgtcaactatgcccccttggatctgccaggctcggcggagccgccaaagcaatgccacccatgccctggggtgccccaggggacgtccccagctcccgtgccttatggttactttggaggcgggtactactcctgccgagtgtcccggagctcgctgaaaccctgtgcccaggcagccaccctggccgcgtaccccgcggagactcccacggccggggaagagtaccccagycgccccactgagtttgccttctatccgggatatccgggaacctaccagcctatggccagttacctggacgtgtctgtggtgcagactctgggtgctcctggagaaccgcgacatgactccctgttgcctgtggacagttaccagtcttgggctctcgctggtggctggaacagccagatgtgttgccagggagaacagaacccaccaggtcccttttggaaggcagcatttgcagactccagcgggcagcaccctcctgacgcctgcgcctttcgtcgcggccgcaagaaacgcattccgtacagcaaggggcagttgcgggagctggagcgggagtatgcggctaacaagttcatcaccaaggacaagaggcgcaagatctcggcagccaccagcctctcggagcgccagattaccatctggtttcagaaccgccgggtcaaagagaagaaggttctcgccaaggtgaagaacagcgctaccccttaagagatctccttgcctgggtgggaggagcgaaagtgggggtgtcctggggagaccaggaacctgccaagcccaggctggggccaaggactctgctgagaggcccctagagacaacacccttcccaggccactggctgctggactgttcctcaggagcggcctgggtacccagtatgtgcagggagacggaaccccatgtgacagcccactccaccagggttcccaaagaacctggcccagtcataatcattcatcctgacagtggcaataatcacgataaccagtactagctgccatgatcgttagcctcatattttctatctagagctctgtagagcactttagaaaccgctttcatgaattgagctaattatgaataaatttggaaggcgatccctttgcagggaagctttctctcagacccccttccattacacctctcaccctggtaacagcaggaagactgaggagaggggaacgggcagattcgttgtgtggctgtgatgtccgtttagcatttttctcagctgacagctgggtaggtggacaattgtagaggctgtctcttcctccctccttgtccaccccatagggtgtacccactggtcttggaagcacccatccttaatacgatgatttttctgtcgtgtgaaaatgaagccagcaggctgcccctagtcagtccttccttccagagaaaaagagatttgagaaagtgcctgggtaattcaccattaatttcctcccccaaactctctgagtcttcccttaatatttctggtggttctgaccaaagcaggtcatggtttgttgagcatttgggatcccagtgaagtagatgtttgtagccttgcatacttagcccttcccaggcacaaacggagtggcagagtggtgccaaccctgttttcccagtccacgtagacagattcacagtgcggaattctggaagctggagacagacgggctctttgcagagccgggactctgagagggacatgagggcctctgcctctgtgttcattctctgatgtcctgtacctgggctcagtgcccggtgggactcatctcctggccgcgcagcaaagccagcgggttcgtgctggtccttcctgcaccttaggctgggggtggggggcctgccggcgcattctccacgattgagcgcacaggcctgaagtctggacaacccgcagaaccgaagctccgagcagcgggtcggtggcgagtagtggggtcggtggcgagcagttggtggtgggccgcggccgccactacctcgaggacatttccctcccggagccagctctcctagaaaccccgcggcggccgccgcagccaagtgtttatggcccgcggtcgggtgggatcctagccctgtctcctctcctgggaaggagtgagggtgggacgtgacttagacacctacaaatctatttaccaaagaggagcccgggactgagggaaaaggccaaagagtgtgagtgcatgcggactgggggttcaggggaagaggacgaggaggaggaagatgaggtcgatttcctgatttaaaaaatcgtccaagccccgtggtccagcttaaggtcctcggttacatgcgccgctcagagcaggtcactttctgccttccacgtcctccttcaaggaagccccatgtgggtagctttcaatatcgcaggttcttactcctctgcctctataagctcaaacccaccaacgatcgggcaagtaaaccccctccctcgccgacttcggaactggcgagagttcagcgcagatgggcctgtggggagggggcaagatagatgagggggagcggcatggtgcggggtgaccccttggagagaggaaaaaggccacaagaggggctgccaccgccactaacggagatggccctggtagagacctttgggggtctggaacctctggactccccatgctctaactcccacactctgctatcagaaacttaaacttgaggattttctctgtttttcactcgcaataaaytcagagcaaacaaaaaaaaaaaaaaaaaaaaactcgag

SEQ ID NO: 334 - DNA, 2417 bp, Homo sapien
ggcggccgctctagagctagtgggatcccccgggctgcacgaattcggcacgagtgagttggagttttacctgtattgttttaatttcaacaagcctgaggactagccacaaatgtacccagtttacaaatgaggaaacaggtgcaaaaaggttgttacctgtcaaaggtcgtatgtggcagagccaagatttgagcccagttatgtctgatgaacttagcctatgctctttaaacttctgaatgctgaccattgaggatatctaaacttagatcaattgcattttccctccaagactatttacttatcaatacaataataccacctttaccaatctattgttttgatacgagactcaaatatgccagatatatgtaaaagcaacctacaagctctctaatcatgctcacctaaaagattcccgggatctaataggctcaaagaaacttcttctagaaatataaaagagaaaattggattatgcaaaaattcattattaatttttttcatccatcctttaattcagcaaacatttatctgttgttgactttatgcagtatggccttttaaggattgggggacaggtgaagaacggggtgccagaatgcatcctcctactaatgaggtcagtacacatttgcattttaaaatgccctgtccagctgggcatggtggatcatgcctgtaatctcaacattggaaggccaaggcaggaggattgcttcagcccaggagttcaagaccagcctgggcaacatagaaagaccccatctctcaatcaatcaatcaatgccctgtctttgaaaataaaactctttaagaaaggtttaatgggcagggtgtggtagctcatgcctataatacagcactttgggaggctgaggcaggaggatcactttagcccagaagttcaagaccagcctgggcaacaagtgacacctcatctcaattttttaataaaatgaatacatacataaggaaagataaaaagaaaagtttaatgaaagaatacagtataaaacaaatctcttggacctaaaagtatttttgttcaagccaaatattgtgaatcacctctctgtgttgaggatacagaatatctaagcccaggaaactgagcagaaagttcatgtactaactaatcaacccgaggcaaggcaaaaatgagactaactaatcaatccgaggcaaggggcaaattagacggaacctgactctggtctattaagcgacaactttccctctgttgtatttttcttttattcaatgtaaaaggataaaaactctctaaaactaaaaacaatgtttgtcaggagttacaaaccatgaccaactaattatggggaatcataaaatatgactgtatgagatcttgatggtttacaaagtgtacccactgttaatcactttaaacattaatgaacttaaaaatgaatttacggagattggaatgtttctttcctgttgtattagttggctcaggctgccataacaaaataccacagactgggaggcttaagtaacagaaattcatttctcacagttctgggggctggaagtccacgatcaaggtgcaggaaaggcaggcttcattctgaggcccctctcttggctcacatgtggccaccctcccactgcgtgctcacatgacctctttgtgctcctggaaagagggtgtgggggacagagggaaagagaaggagagggaactctctggtgtctcgtctttcaaggaccctaacctgggccactttggcccaggcactgtggggtggggggttgtggctgctctgctctgagtggccaagataaagcaacagaaaaatgtccaaagctgtgcagcaaagacaagccaccgaacagggatctgctcatcagtgtggggacctccaagtcggccaccctggaggcaagcccccacagagcccatgcaaggtggcagcagcagaagaagggaattgtccctgtccttggcacattcctcaccgacctggtgatgctggacactgcgatgaatggtaatgtggatgagaatatgatggactcccagaaaaggagacccagctgctcaggtggctgcaaatcattacagccttcatcctggggaggaactgggggcctggttctgggtcagagagcagcccagtgagggtgagagctacagcctgtcctgccagctggatccccagtcccggtcaaccagtaatcaaggctgagcagatcaggcttcccggagctggtcttgggaagccagccctggggtgagttggctcctgctgtggtactgagacaatattgtcataaattcaatgcgcccttgtatccctttttcttttttatctgtctacatctataatcactatgcatactagtctttgttagtgtttctattcmacttaatagagatatgttatact

SEQ ID NO: 335 - DNA, 2984 bp, Homo sapien
atccctccttccccactctcctttccagaaggcacttggggtcttatctgttggactctgaaaacacttcaggcgcccttccaaggcttccccaaacccctaagcagccgcagaagcgctcccgagctgccttctcccacactcaggtgatcgagttggagaggaagttcagccatcagaagtacctgtcggcccctgaacgggcccacctggccaagaacctcaagctcacggagacccaagtgaagatatggttccagaacagacgctataagactaagcgaaagcagctctcctcggagctgggagacttggagaagcactcctctttgccggccctgaaagaggaggccttctcccgggcctccctggtctccgtgtataacagctatccttactacccatacctgtactgcgtgggcagctggagcccagctttttggtaatgccagctcaggtgacaaccattatgatcaaaaactgccttccccagggtgtctctatgaaaagcacaaggggccaaggtcagggagcaagaggtgtgcacaccaaagctattggagatttgcgtggaaatctcasattcttcactggtgagacaatgaaacaacagagacagtgaaagttttaatacctaagtcattcccccagtgcatactgtaggtcattttttttgcttctggctacctgtttgaaggggagagagggaaaatcaagtggtattttccagcactttgtatgattttggatgagctgtacacccaaggattctgttctgcaactccatcctcctgtgtcactgaatatcaactctgaaagagcaaacctaacaggagaaaggacaaccaggatgaggatgtcaccaactgaattaaacttaagtccagaagcctcctgttggccttggaatatggccaaggctctctctgtccctgtaaaagagaggggcaaatagagagtctccaagagaacgccctcatgctcagcacatatttgcatgggagggggagatgggtgggaggagatgaaaatatcagcttttcttattcctttttattccttttaaaatggtatgccaacttaagtatttacagggtggcccaaatagaacaagatgcactcgctgtgattttaagacaagctgtataaacagaactccactgcaagagggggggccgggccaggagaatctccgcttgtccaagacaggggcctaaggagggtctccacactgctgctaggggctgttgcatttttttattagtagaaagtggaaaggcctcttctcaacttttttcccttgggctggagaatttagaatcagaagtttcctggagttttcaggctatcatatatactgtatcctgaaaggcaacataattcttccttccctccttttaaaattttgtgttcctttttgcagcaattactcactaaagggcttcattttagtccagatttttagtctggctgcacctaacttatgcctcgcttatttagcccgagatctggtctttttttttttttttttttttccgtctccccaaagctttatctgtcttgactttttaaaaaagtttgggggcagattctgaattggctaaaagacatgcatttttaaaactagcaactcttatttctttcctttaaaaatacatagcattaaatcccaaatcctatttaaagacctgacagcttgagaaggtcactactgcatttataggaccttctggtggttctgctgttacgtttgaagtctgacaatccttgagaatctttgcatgcagaggaggtaagaggtattggattttcacagaggaagaacacagcgcagaatgaagggccaggcttactgagctgtccagtggagggctcatgggtgggacatggaaaagaaggcagcctaggccctggggagcccagtccactgagcaagcaagggactgagtgagccttttgcaggaaaaggctaagaaaaaggaaaaccattctaaaacacaacaagaaactgtccaaatgctttgggaactgtgtttattgcctataatgggtccccaaaatgggtaacctagacttcagagagaatgagcagagagcaaaggagaaatctggctgtccttccattttcattctgttatctcaggtgagctggtagaggggagacattagaaaaaaatgaaacaacaaaacaattactaatgaggtacgctgaggcctgggagtctcttgactccactacttaattccgtttagtgagaaacctttcaattttcttttattagaagggccagcttactgttggtggcaaaattgccaacataagttaatagaaagttggccaatttcaccccattttctgtggtttgggctccacattgcaatgttcaatgccacgtgctgctgacaccgaccggagtactagccagcacaaaaggcagggtagcctgaattgctttctgctctttacatttcttttaaaataagcatttagtgctcagtccctactgagtactctttctctcccctcctctgaatttaattctttcaacttgcaatttgcaaggattacacatttcactgtgatgtatattgtgttgcaaaaaaaaaaaaaagtgtctttgtttaaaattacttggtttgtgaatccatcttgctttttccccattggaactagtcattaacccatctctgaactggtagaaaaacatctgaagagctagtctatcagcatctgacaggtgaattggatggttctcagaaccatttcacccagacagcctgtttctatcctgtttaataaattagtttgggttctctacatgcataacaaaccctgctccaatctgtcacataaaagtctgtgacttgaagtttagtcagcacccccaccaaactttatttttctatgtgttttttgcaacatatgagtgttttgaaaataaagtacccatgtctttattagaaaaaaaaaaaaaaaaaaaaaa

SEQ ID NO: 336 - protein, 147 aa, Homo sapien
PSFPTLLSRRHLGSYLLDSENTSGALPRLPQTPKQPQKRSRAAFSHTQVIELERKFSHQKYLSAPERAHLAKNLKLTETQVKIWFQNRRYKTKRKQLSSELGDLEKHSSLPALKEEAFSRASLVSVYNSYPYYPYLYCVGSWSPAFW

SEQ ID NO: 337 - protein, 9 aa, Homo sapien
ALTGFTFSA

SEQ ID NO: 338 - protein, 9 aa, Homo sapien
LLANDLMLI

SEQ ID NO: 339 - protein, 318 aa, Homo sapien
MVELMFPLLLLLLPFLLYMAAPQIRKMLSSGVCTSTVQLPGKVVVVTGANTGIGKETAKELAQRGARVYLACRDVEKGELVAKEIQTTTGNQQVLVRKLDLSDTKSIRAFAKGFLAEEKHLHVLINNAGVMMCPYSKTADGFEMHIGVNHLGHFLLTHLLLEKLKESAPSRIVNVSSLAHHLGRIHFHNLQGEKFYNAGLAYCHSKLANILFTQELARRLKGSGVTTYSVHPGTVQSELVRHSSFMRWMWWLFSFFIKTPQQGAQTSLHCALTEGLEILSGNHFSDCHVAWVSAQARNETIARRLWDVSCDLLGLPID

SEQ ID NO: 340 - DNA, 483 bp, Homo sapien
gccgaggtctgccttcacacggaggacacgagactgcttcctcaagggctcctgcctgcctggacactggtgggaggcgctgtttagttggctgttttcagaggggtctttcggagggacctcctgctgcaggctggagtgtctttattcctggcgggagaccgcacattccactgctgaggttgtgggggcggtttatcaggcagtgataaacataagatgtcatttccttgactccggccttcaattttctctttggctgacgacggagtccgtggtgtcccgatgtaactgacccctgctccaaacgtgacatcactgatgctcttctcgggggtgctgatggcccgcttggtcacgtgctcaatctcgccattcgactcttgctccaaactgtatgaagacacctgactgcacgttttttctgggcttccagaatttaaagtgaaaggcagcactcctaagctccgactccgatgcctg

SEQ ID NO: 341 - DNA, 344 bp, Homo sapien
ctgctgctgagtcacagatttcattataaatagcctccctaaggaaaatacactgaatgctatttttactaaccattctatttttatagaaatagctgagagtttctaaaccaactctctgctgccttacaagtattaaatattttacttctttccataaagagtagctcaaaatatgcaattaatttaataatttctgatgatggttttatctgcagtaatatgtatatcatctattagaatttacttaatgaaaaactgaagagaacaaaatttgtaaccactagcacttaagtactcctgattcttaacattgtctttaatgaccacaagacaaccaacag

SEQ ID NO: 342 - DNA, 592 bp, Homo sapien
acagcaaaaaagaaactgagaagcccaatytgctttcttgttaacatccacttatccaaccaatgtggaaacttcttatacttggttccattatgaagttggacaattgctgctatcacacctggcaggtaaaccaatgccaagagagtgatggaaaccattggcaagactttgttgatgaccaggattggaattttataaaaatattgttgatgggaagttgctaaagggtgaattacttccctcagaagagtgtaaagaaaagtcagagatgctataatagcagctattttaattggcaagtgccactgtggaaagagttcctgtgtgtgctgaagttctgaagggcagtcaaattcatcagcatgggctgtttggtgcaaatgcaaaagcacaggtctttttagcatgctggtctctcccgtgtccttatgcaaataatcgtcttcttctaaatttctcctaggcttcattttccaaagttcttcttggtttgtgatgtcttttctgctttccattaattctataaaatagtatggcttcagccacccactcttcgccttagcttgaccgtgagtctcggctgccgctg

SEQ ID NO: 343 - DNA, 382 bp, Homo sapien
ttcttgacctcctcctccttcaagctcaaacaccacctcccttattcaggaccggcacttcttaatgtttgtggctttctctccagcctctcttaggaggggtaatggtggagttggcatcttgtaactctcctttctcctttcttcccctttctctgcccgcctttcccatcctgctgtagacttcttgattgtcagtctgtgtcacatccagtgattgttttggtttctgttccctttctgactgcccaaggggctcagaaccccagcaatcccttcctttcactaccttcttttttgggggtagttggaagggactgaaattgtggggggaaggtaggaggcacatcaataaagaggaaaccaccaagctgaaaaaaaa

SEQ ID NO: 344 - DNA, 536 bp, Homo sapien
ctgggcctgaagctgtagggtaaatcagaggcaggcttctgagtgatgagagtcctgagacaataggccacataaacttggctggatggaacctcacaataaggtggtcacctcttgtttgtttagggggatgccaaggataaggccagctcagttatatgaagagaagcagaacaaacaagtctttcagagaaatggatgcaatcagagtgggatcccggtcacatcaaggtcacactccaccttcatgtgcctgaatggttgccaggtcagaaaaatccaccccttacgagtgcggcttcgaccctatatcccccgcccgcgtccctttctccataaaattcttcttagtagctattaccttcttattatttgatctagaaattgccctccttttacccctaccatgagccctacaaacaactaacctgccactaatagttatgtcatccctcttattaatcatcatcctagccctaagtctggcctatgagtgactacaaaaaggattagactgagccgaataacaaaaaaaa

SEQ ID NO: 345 - DNA, 251 bp, Homo sapien
accttttgaggtctctctcaccacctccacagccaccgtcaccgtgggatgtgctggatgtgaatgaagcccccatctttgtgcctcctgaaaagagagtggaagtgtccgaggactttggcgtgggccaggaaatcacatcctacactgcccaggagccagacacatttatggaacagaaaataacatatcggatttggagagacactgccaactggctggagattaatccggacactggtgccatttcc

SEQ ID NO: 346 - DNA, 282 bp, Homo sapien
  misc_feature (1)...(282): n = A,T,C or G
cgcgtctctgacactgtgatcatgacaggggttcaaacagaaagtgcctgggccctccttctaagtcttgttaccaaaaaaaggaaaaagaaaagatcttctcagttacaaattctgggaagggagactatacctggctcttgccctaagtgagaggtcttccctcccgcaccaaaaaatagaaaggctttctatttcactggcccaggtagggggaaggagagtaactttgagtctgtgggtctcatttcccaaggtgccttcaatgctcatnaaaaccaa

SEQ ID NO: 347 - DNA, 201 bp, Homo sapien
  misc_feature (1)...(201): n = A,T,C or G
acacacataatattataaaatgccatctaattggaaggagctttctatcattgcaagtcataaatataacttttaaaanantactancagcttttacctangctcctaaatgcttgtaaatctgagactgactggacccacccagacccagggcaaagatacatgttaccatatcatctttataaagaatttttttttgtc

SEQ ID NO: 348 - DNA, 251 bp, Homo sapien
ctgttaatcacaacatttgtgcatcacttgtgccaagtgagaaaatgttctaaaatcacaagagagaacagtgccagaatgaaactgaccctaagtcccaggtgcccctgggcaggcagaaggagacactcccagcatggaggagggtttatcttttcatcctaggtcaggtctacaatgggggaaggttttattatagaactcccaacagcccacctcactcctgccacccacccgatggccctgcctcc

SEQ ID NO: 349 - DNA, 251 bp, Homo sapien
taaaaatcaagccatttaattgtatctttgaaggtaaacaatatatgggagctggatcacaacccctgaggatgccagagctatgggtccagaacatggtgtggtattatcaacagagttcagaagggtctgaactctacgtgttaccagagaacataatgcaattcatgcattccacttagcaattttgtaaaataccagaaacagaccccaagagtctttcaagatgaggaaaattcaactcctggttt

SEQ ID NO: 350 - DNA, 908 bp, Homo sapien
ctggacactttgcgagggcttttgctggctgctgctgctgcccgtcatgctactcatcgtagcccgcccggtgaagctcgctgctttccctacctccttaagtgactgccaaacgcccaccggctggaattgctctggttatgatgacagagaaaatgatctcttcctctgtgacaccaacacctgtaaatttgatggggaatgtttaagaattggagacactgtgacttgcgtctgtcagttcaagtgcaacaatgactatgtgcctgtgtgtggctccaatggggagagctaccagaatgagtgttacctgcgacaggctgcatgcaaacagcagagtgagatacttgtggtgtcagaaggatcatgtgccacagtccatgaaggctctggagaaactagtcaaaaggagacatccacctgtgatatttgccagtttggtgcagaatgtgacgaagatgccgaggatgtctggtgtgtgtgtaatattgactgttctcaaaccaacttcaatcccctctgcgcttctgatgggaaatcttatgataatgcatgccaaatcaaagaagcatcgtgtcagaaacaggagaaaattgaagtcatgtctttgggtcgatgtcaagataacacaactacaactactaagtctgaagatgggcattatgcaagaacagattatgcagagaatgctaacaaattagaagaaagtgccagagaacaccacataccttgtccggaacattacaatggcttctgcatgcatgggaagtgtgagcattctatcaatatgcaggagccatcttgcaggtgtgatgctggttatactggacaacactgtgaaaaaaaggactacagtgttctatacgttgttcccggtcctgtacgatttcagtatgtcttaatcgcag

SEQ ID NO: 351 - DNA, 472 bp, Homo sapien
ccagttatttgcaagtggtaagagcctatttaccataaataatactaagaaccaactcaagtcaaaccttaatgccattgttattgtgaattaggattaagtagtaattttcaaaattcacattaacttgattttaaaatcagwtttgygagtcatttaccacaagctaaatgtgtacactatgataaaaacaaccattgtattcctgtttttctaaacagtcctaatttctaacactgtatatatccttcgacatcaatgaactttgttttcttttactccagtaataaagtaggcacagatctgtccacaacaaacttgccctctcatgccttgcctctcaccatgctctgctccaggtcagcccccttttggcctgtttgttttgtcaaaaacctaatctgcttcttgcttttcttggtaatatatatttagggaagatgttgctttgcccacacacgaagcaaagtaa

SEQ ID NO: 352 - DNA, 251 bp, Homo sapien
ctcaaagctaatctctcgggaatcaaaccagaaaagggcaaggatcttaggcatggtggatgtggataaggccaggtcaatggctgcaagcatgcagagaaagaggtacatcggagcgtgcaggctgcgttccgtccttacgatgaagaccacgatgcagtttccaaacattgccactacatacatggaaaggagggggaagccaacccagaaatgggctttctctaatcctgggataccaataagcacaa

SEQ ID NO: 353 - DNA, 436 bp, Homo sapien
ttttttttttttttttttttttttttacaacaatgcagtcatttatttattgagtatgtgcacattatggtattattactatactgattatatttatcatgtgacttctaattaraaaatgtatccaaaagcaaaacagcagatatacaaaattaaagagacagaagatagacattaacagataaggcaacttatacattgacaatccaaatccaatacatttaaacatttgggaaatgagggggacaaatggaagccaratcaaatttgtgtaaaactattcagtatgtttcccttgcttcatgtctgaraaggctctcccttcaatggggatgacaaactccaaatgccacacaaatgttaacagaatactagattcacactggaacgggggtaaagaagaaattattttctataaaagggctcctaatgtagt

SEQ ID NO: 354 - DNA, 854 bp, Homo sapien
ccttttctagttcaccagttttctgcaaggatgctggttagggagtgtctgcaggaggagcaagtctgaaaccaaatctaggaaacataggaaacgagccaggcacagggctggtgggccatcagggaccaccctttgggttgatattttgcttaatctgcatcttttgagtaagatcatctggcagtagaagctgttctccaggtacatttctctagctcatgtacaaaaacatcctgaaggactttgtcaggtgccttgctaaaagccagatgcgttcggcacttccttggtctgaggttaattgcacacctacaggcactgggctcatgctttcaagtattttgtcctcactttagggtgagtgaaagatccccattataggagcacttgggagagatcatataaaagctgactcttgagtacatgcagtaatggggtagatgtgtgtggtgtgtcttcattcctgcaagggtgcttgttagggagtgtttccaggaggaacaagtctgaaaccaatcatgaaataaatggtaggtgtgaactggaaaactaattcaaaagagagatcgtgatatcagtgtggttgatacaccttggcaatatggaaggctctaatttgcccatatttgaaataataattcagctttttgtaatacaaaataacaaaggattgagaatcatggtgtctaatgtataaaagacccaggaaacataaatatatcaactgcataaatgtaaaatgcatgtgacccaagaaggccccaaagtggcagacaacattgtacccattttcccttccaaaatgtgagcggcgggcctgctgctttcaaggctgtcacacgggatgtcag

SEQ ID NO: 355 - DNA, 676 bp, Homo sapien
gaaattaagtatgagctaaattccctgttaaaacctctaggggtgacagatctcttcaaccaggtcaaagctgatctttctggaatgtcaccaaccaagggcctatatttatcaaaagccatccacaagtcatacctggatgtcagcgaagagggcacggaggcagcagcagccactggggacagcatcgctgtaaaaagcctaccaatgagagctcagttcaaggcgaaccaccccttcctgttctttataaggcacactcataccaacacgatcctattctgtggcaagcttgcctctccctaatcagatggggttgagtaaggctcagagttgcagatgaggtgcagagacaatcctgtgactttcccacggccaaaaagctgttcacacctcacgcacctctgtgcctcagtttgctcatctgcaaaataggtctaggatttcttccaaccatttcatgagttgtgaagctaaggctttgttaatcatggaaaaaggtagacttatgcagaaagcctttctggctttcttatctgtggtgtctcatttgagtgctgtccagtgacatgatcaagtcaatgagtaaaattttaagggattagattttcttgacttgtatgtatctgtgagatcttgaataagtgacctgacatctctgcttaaagaaaaccag

SEQ ID NO: 356 - DNA, 574 bp, Homo sapien
tttttttttttttttcaggaaaacattctcttactttatttgcatctcagcaaaggttctcatgtggcacctgactggcatcaaaccaaagttcgtaggccaacaaagatgggccactcacaagcttcccatttgtagatctcagtgcctatgagtatctgacacctgttcctctcttcagtctcttagggaggcttaaatctgtctcaggtgtgctaagagtgccagcccaaggkggtcaaaagtccacaaaactgcagtctttgctgggatagtaagccaagcagtgcctggacagcagagttcttttcttgggcaacagataaccagacaggactctaatcgtgctcttattcaacattcttctgtctctgcctagactggaataaaaagccaatctctctcgtggcacagggaaggagatacaagctcgtttacatgtgatagatctaacaaaggcatctaccgaagtctggtctggatagacggcacagggagctcttaggtcagcgctgctggttggaggacattcctgagtccagctttgcagcctttgtgcaacagtactttccca

SEQ ID NO: 357 - DNA, 393 bp, Homo sapien
tttttttttttttttttttttttttttttttacagaatataratgctttatcactgkacttaatatggkgkcttgttcactatacttaaaaatgcaccactcataaatatttaattcagcaagccacaaccaaracttgattttatcaacaaaaacccctaaatataaacggsaaaaaagatagatataattattccagtttttttaaaacttaaaaratattccattgccgaattaaraaraarataagtgttatatggaaagaagggcattcaagcacactaaaraaacctgaggkaagcataatctgtacaaaattaaactgtcctttttggcattttaacaaatttgcaacgktcttttttttctttttctgtttttttttttttttac

SEQ ID NO: 358 - DNA, 630 bp, Homo sapien
acagggtaaacaggaggatccttgctctcacggagcttacattctagcaggaggacaatattaatgtttataggaaaatgatgagtttatgacaaaggaagtagatagtgttttacaagagcatagagtagggaagctaatccagcacagggaggtcacagagacatccctaaggaagtggagtttaaactgagagaagcaagtgcttaaactgaaggatgtgttgaagaagaagggagagtagaacaatttgggcagagggaaccttatagaccctaaggtgggaaggttcaaagaactgaaagagagctagaacagctggagccgttctccggtgtaaagaggagtcaaagagataagattaaagatgtgaagattaagatcttggtggcattcagggattggcacttctacaagaaatcactgaagggagtaatgtgacattacttttcacttcaggatggccattctaactccagggggtagactggactaggtaagactggaggcaggtagacctcttctaaggcctgcgatagtgaaagacaaaaataagtggggaaattcaggggatagtgaaaatcagtaggacttaatgagcaagccagaggttcctccacaacaaccagt

SEQ ID NO: 359 - DNA, 620 bp, Homo sapien
acagcattccaaaatatacatctagagactaarrgtaaatgctctatagtgaagaagtaataattaaaaaatgctactaatatagaaaatttataatcagaaaaataaatattcagggagctcaccagaagaataaagtgctctgccagttattaaaggattactgctggtgaattaaatatggcattccccaagggaaatagagagattcttctggattatgttcaatatttatttcacaggattaactgttttaggaacagatataaagcttcgccacggaagagatggacaaagcacaaagacaacatgataccttaggaagcaacactaccctttcaggcataaaatttggagaaatgcaacattatgcttcatgaataatatgtagaaagaaggtctgatgaaaatgacatccttaatgtaagataactttataagaattctgggtcaaataaaattctttgaagaaaacatccaaatgtcattgacttatcaaatactatcttggcatataacctatgaaggcaaaactaaacaaacaaaaagctcacaccaaacaaaaccatcaacttattttgtattctataacatacgagactgtaaagatgtgacagtgt

SEQ ID NO: 360 - DNA, 431 bp, Homo sapien
aaaaaaaaaaagccagaacaacatgtgatagataatatgattggctgcacacttccagactgatgaatgatgaacgtgatggactattgtatggagcacatcttcagcaagagggggaaatactcatcatttttggccagcagttgtttgatcaccaaacatcatgccagaatactcagcaaaccttcttagctcttgagaagtcaaagtccgggggaatttattcctggcaattttaattggactccttatgtgagagcagcggctacccagctggggtggtggagcgaacccgtcactagtggacatgcagtggcagagctcctggtaaccacctagaggaatacacaggcacatgtgtgatgccaagcgtgacacctgtagcactcaaatttgtcttgtttttgtctttcggtgtgtagattcttagt

SEQ ID NO: 361 - DNA, 351 bp, Homo sapien
acactgatttccgatcaaaagaatcatcatctttaccttgacttttcagggaattactgaactttcttctcagaagatagggcacagccattgccttggcctcacttgaagggtctgcatttgggtcctctggtctcttgccaagtttcccagccactcgagggagaaatatcgggaggtttgacttcctccggggctttcccgagggcttcaccgtgagccctgcggccctcagggctgcaatcctggattcaatgtctgaaacctcgctctctgcctgctggacttctgaggccgtcactgccactctgtcctccagctctgacagctcctcatctgtggtcctgttgt

SEQ ID NO: 362 - DNA, 463 bp, Homo sapien
acttcatcaggccataatgggtgcctcccgtgagaatccaagcacctttggactgcgcgatgtagatgagccggctgaagatcttgcgcatgcgcggcttcagggcgaagttcttggcgcccccggtcacagaaatgaccaggttgggtgttttcaggtgccagtgctgggtcagcagctcgtaaaggatttccgcgtccgtgtcgcaggacagacgtatatacttccctttcttccccagtgtctcaaactgaatatccccaaaggcgtcggtaggaaattccttggtgtgtttcttgtagttccatttctcactttggttgatctgggtgccttccatgtgctggctctgggcatagccacacttgcacacattctccctgataagcacgatggtgtggacaggaaggaaggatttcattgagcctgcttatggaaactggtattgttagcttaaatagac

SEQ ID NO: 363 - DNA, 653 bp, Homo sapien
  misc_feature (1)...(653): n = A,T,C or G
acccccgagtncctgnctggcatactgngaacgaccaacgacacacccaagctcggcctcctcttggngattctgggtgacatcttcatgaatggcaaccgtgccagwgaggctgtcctctgggaggcactacgcaagatgggactgcgtcctggggtgagacatcctctccttggagatctaacgaaacttctcacctatgagttgtaaagcagaaatacctgnactacagacgagtgcccaacagcaaccccccggaagtatgagttcctctrgggcctccgttcctaccatgagasctagcaagatgnaagtgttgagantcattgcagaggttcagaaaagagacccntcgtgactggtctgcacagttcatggaggctgcagatgaggccttggatgctctggatgctgctgcagctgaggccgaagcccgggctgaagcaagaacccgcatgggaattggagatgaggctgtgtntgggccctggagctgggatgacattgagtttgagctgctgacctgggatgaggaaggagattttggagatccntggtccagaattccatttaccttctgggccagataccaccagaatgcccgctccagattccctcagacctttgccggtcccattattggtcstggtggt

SEQ ID NO: 364 - DNA, 401 bp, Homo sapien
actagaggaaagacgttaaaccactctactaccacttgtggaactctcaaagggtaaatgacaaagccaatgaatgactctaaaaacaatatttacatttaatggtttgtagacaataaaaaaacaaggtggatagatctagaattgtaacattttaagaaaaccatagcatttgacagatgagaaagctcaattatagatgcaaagttataactaaactactatagtagtaaagaaatacatttcacacccttcatataaattcactatcttggcttgaggcactccataaaatgtatcacgtgcatagtaaatctttatatttgctatggcgttgcactagaggacttggactgcaacaagtggatgcgcggaaaatgaaatcttcttcaatagcccag

SEQ ID NO: 365 - DNA, 356 bp, Homo sapien
ccagtgtcatatttgggcttaaaatttcaagaagggcacttcaaatggctttgcatttgcatgtttcagtgctagagcgtaggaatagaccctggcgtccactgtgagatgttcttcagctaccagagcatcaagtctctgcagcaggtcattcttgggtaaagaaatgacttccacaaactctccatcccctggctttggcttcggccttgcgttttcggcatcatctccgttaatggtgactgtcacgatgtgtatagtacagtttgacaagcctgggtccatacagaccgctggagaacattcggcaatgtcccctttgtagccagtttcttcttcgagctcccggagagcag

SEQ ID NO: 366 - DNA, 1851 bp, Homo sapien
tcatcaccattgccagcagcggcaccgttagtcaggttttctgggaatcccacatgagtacttccgtgttcttcattcttcttcaatagccataaatcttctagctctggctggctgttttcacttcctttaagcctttgtgactcttcctctgatgtcagctttaagtcttgttctggattgctgttttcagaagagatttttaacatctgtttttctttgtagtcagaaagtaactggcaaattacatgatgatgactagaaacagcatactctctggccgtctttccagatcttgagaagatacatcaacattttgctcaagtagagggctgactatacttgctgatccacaacatacagcaagtatgagagcagttcttccatatctatccagcgcatttaaattcgcttttttcttgattaaaaatttcaccacttgctgtttttgctcatgtataccaagtagcagtggtgtgaggccatgcttgttttttgattcgatatcagcaccgtataagagcagtgctttggccattaatttatcttcattgtagacagcatagtgtagagtggtatttccatactcatctggaatatttggatcagtgccatgttccagcaacattaacgcacattcatcttcctggcattgtacggcctttgtcagagctgtcctctttttgttgtcaaggacattaagttgacatcgtctgtccagcacgagttttactacttctgaattcccattggcagaggccagatgtagagcagtcctcttttgcttgtccctcttgttcacatccgtgtccctgagcatgacgatgagatcctttctggggactttaccccaccaggcagctctgtggagcttgtccagatcttctccatggacgtggtacctgggatccatgaaggcgctgtcatcgtagtctccccaagcgaccacgttgctcttgccgctcccctgcagcaggggaagcagtggcagcaccacttgcacctcttgctcccaagcgtcttcacagaggagtcgttgtggtctccagaagtgcccacgttgctcttgccgctccccctgtccatccagggaggaagaaatgcaggaaatgaaagatgcatgcacgatggtatactcctcagccatcaaacttctggacagcaggtcacttccagcaaggtggagaaagctgtccacccacagaggatgagatccagaaaccacaatatccattcacaaacaaacacttttcagccagacacaggtactgaaatcatgtcatctgcggcaacatggtggaacctacccaatcacacatcaagagatgaagacactgcagtatatctgcacaacgtaatactcttcatccataacaaaataatataattttcctctggagccatatggatgaactatgaaggaagaactccccgaagaagccagtcgcagagaagccacactgaagctctgtcctcagccatcagcgccacggacaggartgtgtttcttccccagtgatgcagcctcaagttatcccgaagctgccgcagcacacggtggctcctgagaaacaccccagctcttccggtctaacacaggcaagtcaataaatgtgataatcacataaacagaattaaaagcaaagtcacataagcatctcaacagacacagaaaaggcatttgacaaaatccagcatccttgtatttattgttgcagttctcagaggaaatgcttctaacttttccccatttagtattatgttggctgtgggcttgtcataggtggtttttattactttaaggtatgtcccttctatgcctgttttgctgagggttttaattctcgtgcc

SEQ ID NO: 367 - DNA, 668 bp, Homo sapien
cttgagcttccaaatayggaagactggcccttacacasgtcaatgttaaaatgaatgcatttcagtattttgaagataaaattrgtagatctataccttgttttttgattcgatatcagcaccrtataagagcagtgctttggccattaatttatctttcattrtagacagcrtagtgyagagtggtatttccatactcatctggaatatttggatcagtgccatgttccagcaacattaacgcacattcatcttcctggcattgtacggcctgtcagtattagacccaaaaacaaattacatatcttaggaattcaaaataacattccacagctttcaccaactagttatatttaaaggagaaaactcatttttatgccatgtattgaaatcaaacccacctcatgctgatatagttggctactgcatacctttatcagagctgtcctctttttgttgtcaaggacattaagttgacatcgtctgtccagcaggagttttactacttctgaattcccattggcagaggccagatgtagagcagtcctatgagagtgagaagactttttaggaaattgtagtgcactagctacagccatagcaatgattcatgtaactgcaaacactgaatagcctgctattactctgccttcaaaaaaaaaaaaaaa

SEQ ID NO: 368 - DNA, 1512 bp, Homo sapien
gggtcgcccagggggsgcgtgggctttcctcgggtgggtgtgggttttccctgggtggggtgggctgggctrgaatcccctgctggggttggcaggttttggctgggattgacttttytcttcaaacagattggaaacccggagttacctgctagttggtgaaactggttggtagacgcgatctgttggctactactggcttctcctggctgttaaaagcagatggtggttgaggttgattccatgccggctgcttcttctgtgaagaagccatttggtctcaggagcaagatgggcaagtggtgctgccgttgcttcccctgctgcagggagagcggcaagagcaacgtgggcacttctggagaccacgacgactctgctatgaagacactcaggagcaagatgggcaagtggtgccgccactgcttcccctgctgcagggggagtggcaagagcaacgtgggcgcttctggagaccacgacgaytctgctatgaagacactcaggaacaagatgggcaagtggtgctgccactgcttcccctgctgcagggggagcrgcaagagcaaggtgggcgcttggggagactacgatgacagtgccttcatggagcccaggtaccacgtccgtggagaagatctggacaagctccacagagctgcctggtggggtaaagtccccagaaaggatctcatcgtcatgctcagggacactgacgtgaacaagaaggacaagcaaaagaggactgctctacatctggcctctgccaatgggaattcagaagtagtaaaactcstgctggacagacgatgtcaacttaatgtccttgacaacaaaaagaggacagctctgayaaaggccgtacaatgccaggaagatgaatgtgcgttaatgttgctggaacatggcactgatccaaatattccagatgagtatggaaataccactctrcactaygctrtctayaatgaagataaattaatggccaaagcactgctcttatayggtgctgatatcgaatcaaaaaacaaggtatagatctactaattttatcttcaaaatactgaaatgcattcattttaacattgacgtgtgtaagggccagtcttccgtatttggaagctcaagcataacttgaatgaaaatattttgaaatgacctaattatctmagactttattttaaatattgttattttcaaagaagcattagagggtacagttttttttttttaaatgcacttctggtaaatacttttgttgaaaacactgaatttgtaaaaggtaatacttactatttttcaatttttccctcctaggatttttttcccctaatgaatgtaagatggcaaaatttgccctgaaataggttttacatgaaaactccaagaaaagttaaacatgtttcagtgaatagagatcctgctcctttggcaagttcctaaaaaacagtaatagatacgaggtgatgcgcctgtcagtggcaaggtttaagatatttctgatctcgtgcc

SEQ ID NO: 369 - DNA, 1853 bp, Homo sapien
gggtcgcccagggggsgcgtgggctttcctcgggtgggtgtgggttttccctgggtggggtgggctgggctrgaatcccctgctggggttggcaggttttggctgggattgacttttytcttcaaacagattggaaacccggagttacctgctagttggtgaaactggttggtagacgcgatctgttggctactactggcttctcctggctgttaaaagcagatggtggttgaggttgattccatgccggctgcttcttctgtgaagaagccatttggtctcaggagcaagatgggcaagtggtgctgccgttgcttcccctgctgcagggagagcggcaagagcaacgtgggcacttctggagaccacgacgactctgctatgaagacactcaggagcaagatgggcaagtggtgccgccactgcttcccctgctgcagggggagtggcaagagcaacgtgggcgcttctggagaccacgacgaytctgctatgaagacactcaggaacaagatgggcaagtggtgctgccactgcttcccctgctgcagggggagcrgcaagagcaaggtgggcgcttggggagactacgatgacagygccttcatggakcccaggtaccacgtccrtggagaagatctggacaagctccacagagctgcctggtggggtaaagtccccagaaaggatctcatcgtcatgctcagggacackgaygtgaacaagarggacaagcaaaagaggactgctctacatctggcctctgccaatgggaattcagaagtagtaaaactcstgctggacagacgatgtcaacttaatgtccttgacaacaaaaagaggacagctctgayaaaggccgtacaatgccaggaagatgaatgtgcgttaatgttgctggaacatggcactgatccaaatattccagatgagtatggaaataccactctrcactaygctrtctayaatgaagataaattaatggccaaagcactgctcttatayggtgctgatatcgaatcaaaaaacaagcatggcctcacaccactgytacttggtrtacatgagcaaaaacagcaagtsgtgaaatttttaatyaagaaaaaagcgaatttaaaatgcrctggatagatatggaagractgctctcatacttgctgtatgttgtggatcagcaagtatagtcagccytctacttgagcaaaatrttgatgtatcttctcaagatctggaaagacggccagagagtatgctgtttctagtcatcatcatgtaatttgccagttactttctgactacaaagaaaaacagatgttaaaaatctcttctgaaaacagcaatccagaacaagacttaaagctgacatcagaggaagagtcacaaaggcttaaaggaagtgaaaacagccagccagaggcatggaaacttttaaatttaaacttttggtttaatgttttttttttttgccttaataatattagatagtcccaaatgaaatwacctatgagactaggctttgagaatcaatagattctttttttaagaatcttttggctaggagcggtgtctcacgcctgtaattccagcaccttgagaggctgaggtgggcagatcacgagatcaggagatcgagaccatcctggctaacacggtgaaaccccatctctactaaaaatacaaaaacttagctgggtgtggtggcgggtgcctgtagtcccagctactcaggargctgaggcaggagaatggcatgaacccgggaggtggaggttgcagtgagccgagatccgccactacactccagcctgggtgacagagcaagactctgtctcaaaaaaaaaaaaaaaaaaaaa

SEQ ID NO: 370 - DNA, 2184 bp, Homo sapien
ggcacgagaattaaaaccctcagcaaaacaggcatagaagggacataccttaaagtaataaaaaccacctatgacaagcccacagccaacataatactaaatggggaaaagttagaagcatttcctctgagaactgcaacaataaatacaaggatgctggattttgtcaaatgccttttctgtgtctgttgagatgcttatgtgactttgcttttaattctgtttatgtgattatcacatttattgacttgcctgtgttagaccggaagagctggggtgtttctcaggagccaccgtgtgctgcggcagcttcgggataacttgaggctgcatcactggggaagaaacacaytcctgtccgtggcgctgatggctgaggacagagcttcagtgtggcttctctgcgactggcttcttcggggagttcttccttcatagttcatccatatggctccagaggaaaattatattattttgttatggatgaagagtattacgttgtgcagatatactgcagtgtcttcatctcttgatgtgtgattgggtaggttccaccatgttgccgcagatgacatgatttcagtacctgtgtctggctgaaaagtgtttgtttgtgaatggatattgtggtttctggatctcatcctctgtgggtggacagctttctccaccttgctggaagtgacctgctgtccagaagtttgatggctgaggagtataccatcgtgcatgcatctttcatttcctgcatttcttcctccctggatggacagggggagcggcaagagcaacgtgggcacttctggagaccacaacgactcctctgtgaagacgcttgggagcaagaggtgcaagtggtgctgccactgcttcccctgctgcaggggagcggcaagagcaacgtggtcgcttggggagactacgatgacagcgccttcatggatcccaggtaccacgtccatggagaagatctggacaagctccacagagctgcctggtggggtaaagtccccagaaaggatctcatcgtcatgctcagggacacggatgtgaacaagagggacaagcaaaagaggactgctctacatctggcctctgccaatgggaattcagaagtagtaaaactcgtgctggacagacgatgtcaacttaatgtccttgacaacaaaaagaggacagctctgacaaaggccgtacaatgccaggaagatgaatgtgcgttaatgttgctggaacatggcactgatccaaatattccagatgagtatggaaataccactctacactatgctgtctacaatgaagataaattaatggccaaagcactgctcttatacggtgctgatatcgaatcaaaaaacaagcatggcctcacaccactgctacttggtatacatgagcaaaaacagcaagtggtgaaatttttaatcaagaaaaaagcgaatttaaatgcgctggatagatatggaagaactgctctcatacttgctgtatgttgtggatcagcaagtatagtcagccctctacttgagcaaaatgttgatgtatcttctcaagatctggaaagacggccagagagtatgctgtttctagtcatcatcatgtaatttgccagttactttctgactacaaagaaaaacagatgttaaaaatctcttctgaaaacagcaatccagaacaagacttaaagctgacatcagaggaagagtcacaaaggcttaaaggaagtgaaaacagccagccagaggcatggaaacttttaaatttaaacttttggtttaatgttttttttttttgccttaataatattagatagtcccaaatgaaatwacctatgagactaggctttgagaatcaatagattctttttttaagaatcttttggctaggagcggtgtctcacgcctgtaattccagcaccttgagaggctgaggtgggcagatcacgagatcaggagatcgagaccatcctggctaacacggtgaaaccccatctctactaaaaatacaaaaacttagctgggtgtggtggcgggtgcctgtagtcccagctactcaggargctgaggcaggagaatggcatgaacccgggaggtggaggttgcagtgagccgagatccgccactacactccagcctgggtgacagagcaagactctgtctcaaaaaaaaaaaaaaaaaaaaa

SEQ ID NO: 371 - DNA, 1855 bp, Homo sapien
  misc_feature (1)...(1855): n = A,T,C or G
tgcacgcatcggccagtgtctgtgccacgtacactgacgccccctgagatgtgcacgccgcacgcgcacgttgcacgcgcggcagcggcttggctggcttgtaacggcttgcacgcgcacgccgcccccgcataaccgtcagactggcctgtaacggcttgcaggcgcacgccgcacgcgcgtaacggcttggctgccctgtaacggcttgcacgtgcatgctgcacgcgcgttaacggcttggctggcatgtagccgcttggcttggctttgcattytttgctkggctkggcgttgktytcttggattgacgcttcctccttggatkgacgtttcctccttggatkgacgtttcytytytcgcgttcctttgctggacttgaccttttytctgctgggtttggcattcctttggggtgggctgggtgttttctccgggggggktkgcccttcctggggtgggcgtgggkcgcccccagggggcgtgggctttccccgggtgggtgtgggttttcctggggtggggtgggctgtgctgggatccccctgctggggttggcagggattgacttttttcttcaaacagattggaaacccggagtaacntgctagttggtgaaactggttggtagacgcgatctgctggtactactgtttctcctggctgttaaaagcagatggtggctgaggttgattcaatgccggctgcttcttctgtgaagaagccatttggtctcaggagcaagatgggcaagtggtgcgccactgcttcccctgctgcagggggagcggcaagagcaacgtgggcacttctggagaccacaacgactcctctgtgaagacgcttgggagcaagaggtgcaagtggtgctgcccactgcttcccctgctgcaggggagcggcaagagcaacgtggkcgcttggggagactacgatgacagcgccttcatggakcccaggtaccacgtccrtggagaagatctggacaagctccacagagctgcctggtggggtaaagtccccagaaaggatctcatcgtcatgctcagggacactgaygtgaacaagarggacaagcaaaagaggactgctctacatctggcctctgccaatgggaattcagaagtagtaaaactcgtgctggacagacgatgtcaacttaatgtccttgacaacaaaaagaggacagctctgacaaaggccgtacaatgccaggaagatgaatgtgcgttaatgttgctggaacatggcactgatccaaatattccagatgagtatggaaataccactctacactatgctgtctacaatgaagataaattaatggccaaagcactgctcttatacggtgctgatatcgaatcaaaaaacaaggtatagatctactaattttatcttcaaaatactgaaatgcattcattttaacattgacgtgtgtaagggccagtcttccgtatttggaagctcaagcataacttgaatgaaaatattttgaaatgacctaattatctaagactttattttaaatattgttattttcaaagaagcattagagggtacagttttttttttttaaatgcacttctggtaaatacttttgttgaaaacactgaatttgtaaaaggtaatacttactatttttcaatttttccctcctaggatttttttcccctaatgaatgtaagatggcaaaatttgccctgaaataggttttacatgaaaactccaagaaaagttaaacatgtttcagtgaatagagatcctgctcctttggcaagttcctaaaaaacagtaatagatacgaggtgatgcgcctgtcagtggcaaggtttaagatatttctgatctcgtgcc

SEQ ID NO: 372 - DNA, 1059 bp, Homo sapien
gcaacgtgggcacttctggagaccacaacgactcctctgtgaagacgcttgggagcaagaggtgcaagtggtgctgcccactgcttcccctgctgcaggggagcggcaagagcaacgtgggcgcttgrggagactmcgatgacagygccttcatggagcccaggtaccacgtccgtggagaagatctggacaagctccacagagctgccctggtggggtaaagtccccagaaaggatctcatcgtcatgctcagggacactgaygtgaacaagarggacaagcaaaagaggactgctctacatctggcctctgccaatgggaattcagaagtagtaaaactcstgctggacagacgatgtcaacttaatgtccttgacaacaaaaagaggacagctctgayaaaggccgtacaatgccaggaagatgaatgtgcgttaatgttgctggaacatggcactgatccaaatattccagatgagtatggaaataccactctrcactaygctrtctayaatgaagataaattaatggccaaagcactgctcttatayggtgctgatatcgaatcaaaaaacaaggtatagatctactaattttatcttcaaaatactgaaatgcattcattttaacattgacgtgtgtaagggccagtcttccgtatttggaagctcaagcataacttgaatgaaaatattttgaaatgacctaattatctaagactttattttaaatattgttattttcaaagaagcattagagggtacagttttttttttttaaatgcacttctggtaaatacttttgttgaaaacactgaatttgtaaaaggtaatacttactatttttcaatttttccctcctaggatttttttcccctaatgaatgtaagatggcaaaatttgccctgaaataggttttacatgaaaactccaagaaaagttaaacatgtttcagtgaatagagatcctgctcctttggcaagttcctaaaaaacagtaatagatacgaggtgatgcgcctgtcagtggcaaggtttaagatatttctgatctcgtgcc

SEQ ID NO: 373 - DNA, 1155 bp, Homo sapien
atggtggttgaggttgattccatgccggctgcctcttctgtgaagaagccatttggtctcaggagcaagatgggcaagtggtgctgccgttgcttcccctgctgcagggagagcggcaagagcaacgtgggcacttctggagaccacgacgactctgctatgaagacactcaggagcaagatgggcaagtggtgccgccactgcttcccctgctgcagggggagtggcaagagcaacgtgggcgcttctggagaccacgacgactctgctatgaagacactcaggaacaagatgggcaagtggtgctgccactgcttcccctgctgcagggggagcggcaagagcaaggtgggcgcttggggagactacgatgacagtgccttcatggagcccaggtaccacgtccgtggagaagatctggacaagctccacagagctgcctggtggggtaaagtccccagaaaggatctcatcgtcatgctcagggacactgacgtgaacaagaaggacaagcaaaagaggactgctctacatctggcctctgccaatgggaattcagaagtagtaaaactcctgctggacagacgatgtcaacttaatgtccttgacaacaaaaagaggacagctctgataaaggccgtacaatgccaggaagatgaatgtgcgttaatgttgctggaacatggcactgatccaaatattccagatgagtatggaaataccactctgcactacgctatctataatgaagataaattaatggccaaagcactgctcttatatggtgctgatatcgaatcaaaaaacaagcatggcctcacaccactgttacttggtgtacatgagcaaaaacagcaagtcgtgaaatttttaatcaagaaaaaagcgaatttaaatgcactggatagatatggaaggactgctctcatacttgctgtatgttgtggatcagcaagtatagtcagccttctacttgagcaaaatattgatgtatcttctcaagatctatctggacagacggccagagagtatgctgtttctagtcatcatcatgtaatttgccagttactttctgactacaaagaaaaacagatgctaaaaatctcttctgaaaacagcaatccagaaaatgtctcaagaaccagaaataaataa

SEQ ID NO: 374 - DNA, 2000 bp, Homo sapien
atggtggttgaggttgattccatgccggctgcctcttctgtgaagaagccatttggtctcaggagcaagatgggcaagtggtgctgccgttgcttcccctgctgcagggagagcggcaagagcaacgtgggcacttctggagaccacgacgactctgctatgaagacactcaggagcaagatgggcaagtggtgccgccactgcttcccctgctgcagggggagtggcaagagcaacgtgggcgcttctggagaccacgacgactctgctatgaagacactcaggaacaagatgggcaagtggtgctgccactgcttcccctgctgcagggggagcggcaagagcaaggtgggcgcttggggagactacgatgacagtgccttcatggagcccaggtaccacgtccgtggagaagatctggacaagctccacagagctgcctggtggggtaaagtccccagaaaggatctcatcgtcatgctcagggacactgacgtgaacaagaaggacaagcaaaagaggactgctctacatctggcctctgccaatgggaattcagaagtagtaaaactcctgctggacagacgatgtcaacttaatgtccttgacaacaaaaagaggacagctctgataaaggccgtacaatgccaggaagatgaatgtgcgttaatgttgctggaacatggcactgatccaaatattccagatgagtatggaaataccactctgcactacgctatctataatgaagataaattaatggccaaagcactgctcttatatggtgctgatatcgaatcaaaaaacaagcatggcctcacaccactgttacttggtgtacatgagcaaaaacagcaagtcgtgaaatttttaatcaagaaaaaagcgaatttaaatgcactggatagatatggaaggactgctctcatacttgctgtatgttgtggatcagcaagtatagtcagccttctacttgagcaaaatattgatgtatcttctcaagatctatctggacagacggccagagagtatgctgtttctagtcatcatcatgtaatttgccagttactttctgactacaaagaaaaacagatgctaaaaatctcttctgaaaacagcaatccagaacaagacttaaagctgacatcagaggaagagtcacaaaggttcaaaggcagtgaaaatagccagccagagaaaatgtctcaagaaccagaaataaataaggatggtgatagagaggttgaagaagaaatgaagaagcatgaaagtaataatgtgggattactagaaaacctgactaatggtgtcactgctggcaatggtgataatggattaattcctcaaaggaagagcagaacacctgaaaatcagcaatttcctgacaacgaaagtgaagagtatcacagaatttgcgaattagtttctgactacaaagaaaaacagatgccaaaatactcttctgaaaacagcaacccagaacaagacttaaagctgacatcagaggaagagtcacaaaggcttgagggcagtgaaaatggccagccagagctagaaaattttatggctatcgaagaaatgaagaagcacggaagtactcatgtcggattcccagaaaacctgactaatggtgccactgctggcaatggtgatgatggattaattcctccaaggaagagcagaacacctgaaagccagcaatttcctgacactgagaatgaagagtatcacagtgacgaacaaaatgatactcagaagcaattttgtgaagaacagaacactggaatattacacgatgagattctgattcatgaagaaaagcagatagaagtggttgaaaaaatgaattctgagctttctcttagttgtaagaaagaaaaagacatcttgcatgaaaatagtacgttgcgggaagaaattgccatgctaagactggagctagacacaatgaaacatcagagccagctaaaaaaaaaaaaaaaaaaaaaaaaaaaaaaaaa

SEQ ID NO: 375 - DNA, 2040 bp, Homo sapien
atggtggttgaggttgattccatgccggctgcctcttctgtgaagaagccatttggtctcaggagcaagatgggcaagtggtgctgccgttgcttcccctgctgcagggagagcggcaagagcaacgtgggcacttctggagaccacgacgactctgctatgaagacactcaggagcaagatgggcaagtggtgccgccactgcttcccctgctgcagggggagtggcaagagcaacgtgggcgcttctggagaccacgacgactctgctatgaagacactcaggaacaagatgggcaagtggtgctgccactgcttcccctgctgcagggggagcggcaagagcaaggtgggcgcttggggagactacgatgacagtgccttcatggagcccaggtaccacgtccgtggagaagatctggacaagctccacagagctgcctggtggggtaaagtccccagaaaggatctcatcgtcatgctcagggacactgacgtgaacaagaaggacaagcaaaagaggactgctctacatctggcctctgccaatgggaattcagaagtagtaaaactcctgctggacagacgatgtcaacttaatgtccttgacaacaaaaagaggacagctctgataaaggccgtacaatgccaggaagatgaatgtgcgttaatgttgctggaacatggcactgatccaaatattccagatgagtatggaaataccactctgcactacgctatctataatgaagataaattaatggccaaagcactgctcttatatggtgctgatatcgaatcaaaaaacaagcatggcctcacaccactgttacttggtgtacatgagcaaaaacagcaagtcgtgaaatttttaatcaagaaaaaagcgaatttaaatgcactggatagatatggaaggactgctctcatacttgctgtatgttgtggatcagcaagtatagtcagccttctacttgagcaaaatattgatgtatcttctcaagatctatctggacagacggccagagagtatgctgtttctagtcatcatcatgtaatttgccagttactttctgactacaaagaaaaacagatgctaaaaatctcttctgaaaacagcaatccagaacaagacttaaagctgacatcagaggaagagtcacaaaggttcaaaggcagtgaaaatagccagccagagaaaatgtctcaagaaccagaaataaataaggatggtgatagagaggttgaagaagaaatgaagaagcatgaaagtaataatgtgggattactagaaaacctgactaatggtgtcactgctggcaatggtgataatggattaattcctcaaaggaagagcagaacacctgaaaatcagcaatttcctgacaacgaaagtgaagagtatcacagaatttgcgaattagtttctgactacaaagaaaaacagatgccaaaatactcttctgaaaacagcaacccagaacaagacttaaagctgacatcagaggaagagtcacaaaggcttgagggcagtgaaaatggccagccagagaaaagatctcaagaaccagaaataaataaggatggtgatagagagctagaaaattttatggctatcgaagaaatgaagaagcacggaagtactcatgtcggattcccagaaaacctgactaatggtgccactgctggcaatggtgatgatggattaattcctccaaggaagagcagaacacctgaaagccagcaatttcctgacactgagaatgaagagtatcacagtgacgaacaaaatgatactcagaagcaattttgtgaagaacagaacactggaatattacacgatgagattctgattcatgaagaaaagcagatagaagtggttgaaaaaatgaattctgagctttctcttagttgtaagaaagaaaaagacatcttgcatgaaaatagtacgttgcgggaagaaattgccatgctaagactggagctagacacaatgaaacatcagagccagctaaaaaaaaaaaaaaaaaaaaaaaaaaaa

SEQ ID NO: 376 - protein, 329 aa, Homo sapien
MDIVVSGSHPLWVDSFLHLAGSDLLSRSLMAEEYTIVHASFISCISSSLDGQGERQEQRGHFWRPQRLLCEDAWEQEVQVVLPLLPLLQGSGKSNVVAWGDYDDSAFMDPRYHVHGEDLDKLHRAAWWGKVPRKDLIVMLRDTDVNKRDKQKRTALHLASANGNSEVVKLVLDRRCQLNVLDNKKRTALTKAVQCQEDECALMLLEHGTDPNIPDEYGNTTLHYAVYNEDKLMAKALLLYGADIESKNKHGLTPLLLGIHEQKQQVVKFLIKKKANLNALDRYGRTALILAVCCGSASIVSPLLEQNVDVSSQDLERRPESMLFLVIIM

SEQ ID NO: 377 - protein, 148 aa, Homo sapien
  VARIANT (1)...(148): Xaa = Any Amino Acid
MTXPSWSPGTTSVEKIWTSSTELPWWGKVPRKDLIVMLRDTDVNKXDKQKRTALHLASANGNSEVVKLXLDRRCQLNVLDNKKRTALXKAVQCQEDECALMLLEHGTDPNIPDEYGNTTLHYAXYNEDKLMAKALLLYGADIESKNKV

SEQ ID NO: 378 - protein, 1719 aa, Homo sapien [sequence omitted]

SEQ ID NO: 379 - protein, 656 aa, Homo sapien
MVVEVDSMPAASSVKKPFGLRSKMGKWCCRCFPCCRESGKSNVGTSGDHDDSAMKTLRSKMGKWCRHCFPCCRGSGKSNVGASGDHDDSAMKTLRNKMGKWCCHCFPCCRGSGKSKVGAWGDYDDSAFMEPRYHVRGEDLDKLHRAAWWGKVPRKDLIVMLRDTDVNKKDKQKRTALHLASANGNSEVVKLLLDRRCQLNVLDNKKRTALIKAVQCQEDECALMLLEHGTDPNIPDEYGNTTLHYAIYNEDKLMAKALLLYGADIESKNKHGLTPLLLGVHEQKQQVVKFLIKKKANLNALDRYGRTALILAVCCGSASIVSLLLEQNIDVSSQDLSGQTAREYAVSSHHHVICQLLSDYKEKQMLKISSENSNPEQDLKLTSEEESQRFKGSENSQPEKMSQEPEINKDGDREVEEEMKKHESNNVGLLENLTNGVTAGNGDNGLIPQRKSRTPENQQFPDNESEEYHRICELVSDYKEKQMPKYSSENSNPEQDLKLTSEEESQRLEGSENGQPELENFMAIEEMKKHGSTHVGFPENLTNGATAGNGDDGLIPPRKSRTPESQQFPDTENEEYHSDEQNDTQKQFCEEQNTGILHDEILIHEEKQIEVVEKMNSELSLSCKKEKDILHENSTLREEIAMLRLELDTMKHQSQL

SEQ ID NO: 380 - protein, 671 aa, Homo sapien
MVVEVDSMPAASSVKKPFGLRSKMGKWCCRCFPCCRESGKSNVGTSGDHDDSAMKTLRSKMGKWCRHCFPCCRGSGKSNVGASGDHDDSAMKTLRNKMGKWCCHCFPCCRGSGKSKVGAWGDYDDSAFMEPRYHVRGEDLDKLHRAAWWGKVPRKDLIVMLRDTDVNKKDKQKRTALHLASANGNSEVVKLLLDRRCQLNVLDNKKRTALIKAVQCQEDECALMLLEHGTDPNIPDEYGNTTLHYAIYNEDKLMAKALLLYGADIESKNKHGLTPLLLGVHEQKQQVVKFLIKKKANLNALDRYGRTALILAVCCGSASIVSLLLEQNIDVSSQDLSGQTAREYAVSSHHHVICQLLSDYKEKQMLKISSENSNPEQDLKLTSEEESQRFKGSENSQPEKMSQEPEINKDGDREVEEEMKKHESNNVGLLENLTNGVTAGNGDNGLIPQRKSRTPENQQFPDNESEEYHRICELVSDYKEKQMPKYSSENSNPEQDLKLTSEEESQRLEGSENGQPEKRSQEPEINKDGDRELENFMAIEEMKKHGSTHVGFPENLTNGATAGNGDDGLIPPRKSRTPESQQFPDTENEEYHSDEQNDTQKQFCEEQNTGILHDEILIHEEKQIEVVEKMNSELSLSCKKEKDILHENSTLREEIAMLRLELDTMKHQSQL

SEQ ID NO: 381 - DNA, 251 bp, Homo sapien
ggagaagcgtctgctggggcaggaaggggtttccctgccctctcacctgtccctcaccaaggtaacatgcttcccctaagggtatcccaacccaggggcctcaccatgacctctgaggggccaatatcccaggagaagcattggggagttgggggcaggtgaaggacccaggactcacacatcctgggcctccaaggcagaggagagggtcctcaagaaggtcaggaggaaaatccgtaacaagcagtcag

SEQ ID NO: 382 - DNA, 3279 bp, Homo sapiens
cttcctgcagcccccatgctggtgaggggcacgggcaggaacagtggacccaacatggaaatgctggagggtgtcaggaagtgatcgggctctggggcagggaggaggggtggggagtgtcactgggaggggacatcctgcagaaggtaggagtgagcaaacacccgctgcaggggaggggagagccctgcggcacctgggggagcagagggagcagcacctgcccaggcctgggaggaggggcctggagggcgtgaggaggagcgagggggctgcatggctggagtgagggatcaggggcagggcgcgagatggcctcacacagggaagagagggcccctcctgcagggcctcacctgggccacaggaggacactgcttttcctctgaggagtcaggagctgtggatggtgctggacagaagaaggacagggcctggctcaggtgtccagaggctgtcgctggcttccctttgggatcagactgcagggagggagggcggcagggttgtggggggagtgacgatgaggatgacctgggggtggctccaggccttgcccctgcctgggccctcacccagcctccctcacagtctcctggccctcagtctctcccctccactccatcctccatctggcctcagtgggtcattctgatcactgaactgaccatacccagccctgcccacggccctccatggctccccaatgccctggagaggggacatctagtcagagagtagtcctgaagaggtggcctctgcgatgtgcctgtgggggcagcatcctgcagatggtcccggccctcatcctgctgacctgtctgcagggactgtcctcctggaccttgccccttgtgcaggagctggaccctgaagtcccctccccataggccaagactggagccttgttccctctgttggactccctgcccatattcttgtgggagtgggttctggagacatttctgtctgttcctgagagctgggaattgctctcagtcatctgcctgcgcggttctgagagatggagttgcctaggcagttattggggccaatctttctcactgtgtctctcctcctttacccttagggtgattctgggggtccacttgtctgtaatggtgtgcttcaaggtatcacatcatggggccctgagccatgtgccctgcctgaaaagcctgctgtgtacaccaaggtggtgcattaccggaagtggatcaaggacaccatcgcagccaacccctgagtgcccctgtcccacccctacctctagtaaatttaagtccacctcacgttctggcatcacttggcctttctggatgctggacacctgaagcttggaactcacctggccgaagctcgagcctcctgagtcctactgacctgtgctttctggtgtggagtccagggctgctaggaaaaggaatgggcagacacaggtgtatgccaatgtttctgaaatgggtataatttcgtcctctccttcggaacactggctgtctctgaagacttctcgctcagtttcagtgaggacacacacaaagacgtgggtgaccatgttgtttgtggggtgcagagatgggaggggtggggcccaccctggaagagtggacagtgacacaaggtggacactctctacagatcactgaggataagctggagccacaatgcatgaggcacacacacagcaaggttgacgctgtaaacatagcccacgctgtcctgggggcactgggaagcctagataaggccgtgagcagaaagaaggggaggatcctcctatgttgttgaaggagggactagggggagaaactgaaagctgattaattacaggaggtttgttcaggtcccccaaaccaccgtcagatttgatgatttcctagcaggacttacagaaataaagagctatcatgctgtggtttattatggtttgttacattgataggatacatactgaaatcagcaaacaaaacagatgtatagattagagtgtggagaaaacagaggaaaacttgcagttacgaagactggcaacttggctttactaagttttcagactggcaggaagtcaaacctattaggctgaggaccttgtggagtgtagctgatccagctgatagaggaactagccaggtgggggcctttccctttggatggggggcatatccgacagttattctctccaagtggagacttacggacagcatataattctccctgcaaggatgtatgataatatgtacaaagtaattccaactgaggaagctcacctgatccttagtgtccagggtttttactgggggtctgtaggacgagtatggagtacttgaataattgacctgaagtcctcagacctgaggttccctagagttcaaacagatacagcatggtccagagtcccagatgtacaaaaacagggattcatcacaaatcccatctttagcatgaagggtctggcatggcccaaggccccaagtatatcaaggcacttgggcagaacatgccaaggaatcaaatgtcatctcccaggagttattcaagggtgagccctttacttgggatgtacaggctttgagcagtgcagggctgctgagtcaaccttttattgtacaggggatgagggaaagggagaggatgaggaagcccccctggggatttggtttggtcttgtgatcaggtggtctatggggctatccctacaaagaagaatccagaaataggggcacattgaggaatgatactgagcccaaagagcattcaatcattgttttatttgccttcttttcacaccattggtgagggagggattaccaccctggggttatgaagatggttgaacaccccacacatagcaccggagatatgagatcaacagtttcttagccatagagattcacagcccagagcaggaggacgctgcacaccatgcaggatgacatgggggatgcgctcgggattggtgtgaagaagcaaggactgttagaggcaggctttatagtaacaagacggtggggcaaactctgatttccgtgggggaatgtcatggtcttgctttactaagttttgagactggcaggtagtgaaactcattaggctgagaaccttgtggaatgcagctgacccagctgatagaggaagtagccaggtgggagcctttcccagtgggtgtgggacatatctggcaagattttgtggcactcctggttacagatactggggcagcaaataaaactgaatcttgttttcagaccttaaaaaaaaaaaaaaaaaaaaagtttt

SEQ ID NO: 383 - protein, 154 aa, Homo sapiens [sequence omitted]

SEQ ID NO: 384 - DNA, 557 bp, Homo sapiens
ggatcctctagagcggccgcctactactactaaattcgcggccgcgtcgacgaagaagagaaagatgtgttttgttttggactctctgtggtcccttccaatgctgtgggtttccaaccaggggaagggtcccttttgcattgccaagtgccataaccatgagcactactctaccatggttctgcctcctggccaagcaggctggtttgcaagaatgaaatgaatgattctacagctaggacttaaccttgaaatggaaagtcttgcaatcccatttgcaggatccgtctgtgcacatgcctctgtagagagcagcattcccagggaccttggaaacagttggcactgtaaggtgcttgctccccaagacacatcctaaaaggtgttgtaatggtgaaaacgtcttccttctttattgccccttcttatttatgtgaacaactgtttgtctttttttgtatcttttttaaactgtaaagttcaattgtgaaaatgaatatcatgcaaataaattatgcgatttttttttcaaagtaaaaaaaaaaaaaaaaaaaaaa

SEQ ID NO: 385 - DNA, 337 bp, Homo sapiens
ttcccaggtgatgtgcgagggaagacacatttactatccttgatggggctgattcctttagtttctctagcagcagatgggttaggaggaagtgacccaagtggttgactcctatgtgcatctcaaagccatctgctgtcttcgagtacggacacatcatcactcctgcattgttgatcaaaacgtggaggtgcttttcctcagctaagaagcccttagcaaaagctcgaatagacttagtatcagacaggtccagtttccgcaccaacacctgctggttccctgtcgtggtctggatctctttggccaccaattcccccttttccacatcccggca

SEQ ID NO: 386 - DNA, 300 bp, Homo sapiens
gggcccgctaccggcccaggccccgcctcgcgagtcctcctccccgggtgcctgcccgcagcccgctcggcccagagggtgggcgcggggctgcctctaccggctggcggctgtaactcagcgaccttggcccgaaggctctagcaaggacccaccgaccccagccgcggcggcggcggcgcggactttgcccggtgtgtggggcggagcggactgcgtgtccgcggacgggcagcgaagatgttagccttcgctgccaggaccgtggaccgatcccagggctgtggtgtaacctcagcc

SEQ ID NO: 387 - DNA, 537 bp, Homo sapiens
gggccgagtcgggcaccaagggactctttgcaggcttccttcctcggatcatcaaggctgccccctcctgtgccatcatgatcagcacctatgagttcggcaaaagcttcttccagaggctgaaccaggaccggcttctgggcggctgaaaggggcaaggaggcaaggaccccgtctctcccacggatggggagagggcaggaggagacccagccaagtgccttttcctcagcactgagggagggggcttgtttcccttccctcccggcgacaagctccagggcagggctgtccctctgggcggcccagcacttcctcagacacaacttcttcctgctgctccagtcgtggggatcatcacttacccaccccccaagttcaagaccaaatcttccagctgcccccttcgtgtttccctgtgtttgctgtagctgggcatgtctccaggaaccaagaagccctcagcctggtgtagtctccctgacccttgttaattccttaagtctaaagatgatgaacttcaaaaaaaaaaaaaaa

SEQ ID NO: 388 - DNA, 520 bp, Homo sapiens
aggataatttttaaaccaatcaaatgaaaaaaacaaacaaacaaaaaaggaaatgtcatgtgaggttaaaccagtttgcattcccctaatgtggaaaaagtaagaggactactcagcactgtttgaagattgcctcttctacagcttctgagaattgtgttatttcacttgccaagtgaaggaccccctccccaacatgccccagcccacccctaagcatggtcccttgtcaccaggcaaccaggaaactgctacttgtggacctcaccagagaccaggagggtttggttagctcacaggacttcccccaccccagaagattagcatcccatactagactcatactcaactcaactaggctcatactcaattgatggttattagacaattccatttctttctggttattataaacagaaaatctttcctcttctcattaccagtaaaggctcttggtatctttctgttggaatgatttctatgaacttgtcttattttaatggtgggttttttttctggt

SEQ ID NO: 389 - DNA, 365 bp, Homo sapiens
cgttgccccagtttgacagaaggaaaggcggagcttattcaaagtctagagggagtggaggagttaaggctggatttcagatctgcctggttccagccgcagtgtgccctctgctcccccaacgactttccaaataatctcaccagcgccttccagctcaggcgtcctagaagcgtcttgaagcctatggccagctgtctttgtgttccctctcacccgcctgtcctcacagctgagactcccaggaaaccttcagactaccttcctctgccttcagcaaggggcgttgcccacattctctgagggtcagtggaagaacctagactcccattgctagaggtagaaaggggaagggtgctggggag

SEQ ID NO: 390 - DNA, 221 bp, Homo sapiens
  misc_feature (1)...(221): n = A,T,C or G
tgcctctccatcctggccccgacttctctgtcaggaaagtggggatggaccccatctgcatacacggnttctcatgggtgtggaacatctctgcttgcggtttcaggaaggcctctggctgctctangagtctgancngantcgttgccccantntgacanaaggaaaggcggagcttattcaaagtctagagggagtggaggagttaaggctggatttca

SEQ ID NO: 391 - DNA, 325 bp, Homo sapiens
  misc_feature (1)...(325): n = A,T,C or G
tggagcaggtcccgaggcctccctagagcctggggccgactctgtgncgatgcangctttctctcgcgcccagcctggagctgctcctggcatctaccaacaatcagncgaggcgagcagtagccagggcactgctgccaacagccagtccnnataccatcatgtnacccggtgngctctnaanttngatntccanagccctacccatcntagttctgctctcccaccggntaccagccccactgcccaggaatcctacagccagtaccctgtcccgacgtctctacctaccagtacgatgagacctccggctactactatgacc

SEQ ID NO: 392 - DNA, 277 bp, Homo sapiens
  misc_feature (1)...(277): n = A,T,C or G
atattgtttaactccttcctttatatcttttaacattttcatggngaaaggttcacatctagtctcacttnggcnagngnctcctacttgagtctcttccccggcctgnnccagtngnaaantaccangaaccgncatgncttaanaacnncctggtttntgggttnntcaatgactgcatgcagtgcaccaccctgtccactacgtgatgctgtaggattaaagtctcacagtgggcggctgaggatacagcgccgcgtcctgtgttgctggggaa

SEQ ID NO: 393 - DNA, 566 bp, Homo sapiens
actagtccagtgtggtggaattcgcggccgcgtcgacggacaggtcagctgtctggctcagtgatctacattctgaagttgtctgaaaatgtcttcatgattaaattcagcctaaacgttttgccgggaacactgcagagacaatgctgtgagtttccaaccttagcccatctgcgggcagagaaggtctagtttgtccatcagcattatcatgatatcaggactggttacttggttaaggaggggtctaggagatctgtcccttttagagacaccttacttataatgaagtatttgggagggtggttttcaaaagtagaaatgtcctgtattccgatgatcatcctgtaaacattttatcatttattaatcatccctgcctgtgtctattattatattcatatctctacgctggaaactttctgcctcaatgtttactgtgcctttgtttttgctagtttgtgttgttgaaaaaaaaaacattctctgcctgagttttaatttttgtccaaagttattttaatctatacaattaaaagcttttgcctatcaaaaaaaaaaaaaaa

SEQ ID NO: 394 - DNA, 384 bp, Homo sapiens
  misc_feature (1)...(384): n = A,T,C or G
gaacatacatgtcccggcacctgagctgcagtctgacatcatcgccatcacgggcctcgctgcaaattnggaccgggccaaggctggactgctggagcgtgtgaaggagctacaggccnagcaggaggaccgggctttaaggagttttaagctgagtgtcactgtagaccccaaataccatcccaagattatcgggagaaagggggcagtaattacccaaatccggttggagcatgacgtgaacatccagtttcctgataaggacgatgggaaccagccccaggaccaaattaccatcacagggtacgaaaagaacacagaagctgccagggatgctatactgagaattgtgggtgaacttgagcagatggtttctgaggacgt

SEQ ID NO: 395 - DNA, 399 bp, Homo sapiens
ggcaaaactgtgtgacctcaataagacctcgcagatccaaggtcaagtatcagaagtgactctgaccttggactccaagacctacatcaacagcctggctatattagatgatgagccagttatcagaggtttcatcattgcggaaattgtggagtctaaggaaatcatggcctctgaagtattcacgtctttccagtaccctgagttctctatagagttgcctaacacaggcagaattggccagctacttgtctgcaattgtatcttcaagaataccctggccatccctttgactgacgtcaagttctctttggaaagcctgggcatctcctcactacagacctctgaccatgggacggtgcagcctggtgagaccatccaatcccaaataaaatgcac

SEQ ID NO: 396 - DNA, 403 bp, Homo sapiens
  misc_feature (1)...(403): n = A,T,C or G
tggagttntcagtgcaaacaagccataaagcttcagtagcaaattactgtctcacagaaagacattttcaacttctgctccagctgctgataaaacaaatcatgtgtttagcttgactccagacaaggacaacctgttccttcataactctctagagaaaaaaaggagttgttagtagatactaaaaaaagtggatgaataatctggatatttttcctaaaaagattccttgaaacacattaggaaaatggagggccttatgatcagaatgctagaattagtccattgtgctgaagcagggtttaggggagggagtgagggataaaagaaggaaaaaaagaagagtgagaaaacctatttatcaaagcaggtgctatcactcaatgttaggccctgctctttt

SEQ ID NO: 397 - DNA, 100 bp, Homo sapiens
  misc_feature (1)...(100): n = A,T,C or G
actagtncagtgtggtggaattcgcggccgcgtcgacctanaanccatctctatagcaaatccatccccgctcctggttggtnacagaatgactgacaaa

SEQ ID NO: 398 - DNA, 278 bp, Homo sapiens
  misc_feature (1)...(278): n = A,T,C or G
gcggccgcgtcgacagcagttccgccagcgctcgcccctgggtggggatgtgctgcacgcccacctggacatctggaagtcagcggcctggatgaaagagcggacttcacctggggcgattcactactgtgcctcgaccagtgaggagagctggaccgacagcgaggtggactcatcatgctccgggcagcccatccacctgtggcagttcctcaaggagttgctactcaagccccacagctatggccgcttcattangtggctcaacaaggagaagg

SEQ ID NO: 399 - DNA, 298 bp, Homo sapiens
  misc_feature (1)...(298): n = A,T,C or G
acggaggtggaggaagcgnccctgggatcganaggatgggtcctgncattgaccncctcnggggtgccngcatggagcgcatgggcgcgggcctgggccacggcatggatcgcgtgggctccgagatcgagcgcatgggcctggtcatggaccgcatgggctccgtggagcgcatgggctccggcattgagcgcatgggcccgctgggcctcgaccacatggcctccancattgancgcatgggccagaccatggagcgcattggctctggcgtggagcncatgggtgccggcatggg

SEQ ID NO: 400 - DNA, 548 bp, Homo sapiens
acatcaactacttcctcattttaaggtatggcagttcccttcatccccttttcctgccttgtacatgtacatgtatgaaatttccttctcttaccgaactctctccacacatcacaaggtcaaagaaccacacgcttagaagggtaagagggcaccctatgaaatgaaatggtgatttcttgagtctcttttttccacgtttaaggggccatggcaggacttagagttgcgagttaagactgcagagggctagagaattatttcatacaggctttgaggccacccatgtcacttatcccgtataccctctcaccatccccttgtctactctgatgcccccaagatgcaactgggcagctagttggccccataattctgggcctttgttgtttgttttaattacttgggcatcccaggaagctttccagtgatctcctaccatgggcccccctcctgggatcaagcccctcccaggccctgtccccagcccctcctgccccagcccacccgcttgccttggtgctcagccctcccattgggagcaggtt

SEQ ID NO: 401 - DNA, 355 bp, Homo sapiens
  misc_feature (1)...(355): n = A,T,C or G
actgtttccatgttatgtttctacacattgctacctcagtgctcctggaaacttagcttttgatgtctccaagtagtccaccttcatttaactctttgaaactgtatcatctttgccaagtaagagtggtggcctatttcagctgctttgacaaaatgactggctcctgacttaacgttctataaatgaatgtgctgaagcaaagtgcccatggtggcggcgaagaaganaaagatgtgttttgttttggactctctgtggtcccttccaatgctgngggtttccaaccaggggaagggtcccttttgcattgccaagtgccataaccatgagcactactctaccatggntctgc

SEQ ID NO: 402 - DNA, 407 bp, Homo sapiens
  misc_feature (1)...(407): n = A,T,C or G
atggggcaagctggataaagaaccaagacccactggagtatgctgtcttcaagaaacccatctcacatgcggtggcatacataggctcaaaataaaggaatggagaaaaatatttcaagcaaatggaaaacagaaaaaagcaggtgttgcactcctactttctgacaaaacagactatgcgaataaagataaaaaagagaaggacattacaaaggtggtcctgacctttgataaatctcattgcttgataccaacctgggctgttttaattgcccaaaccaaaaggataatttgctgaggttgtggagcttctcccctgcagagagtccctgatctcccaaaatttggttgagatgtaaggntgattttgctgacaactccttttctgaagttttactcatttccaa

SEQ ID NO: 403 - DNA, 303 bp, Homo sapiens
  misc_feature (1)...(303): n = A,T,C or G
cagtatttatagccnaactgaaaagctagtagcaggcaagtctcaaatccaggcaccaaatcctaagcaagagccatggcatggtgaaaatgcaaaaggagagtctggccaatctacaaatagagaacaagacctactcagtcatgaacaaaaaggcagacaccaacatggatctcatgggggattggatattgtaattatagagcaggaagatgacagtgatcgtcatttggcacaacatcttaacaacgaccgaaacccattatttacataaacctccattcggtaaccatgttgaaagga

SEQ ID NO: 404 - DNA, 225 bp, Homo sapiens
aagtgtaacttttaaaaatttagtggattttgaaaattcttagaggaaagtaaaggaaaaattgttaatgcactcatttacctttacatggtgaaagttctctcttgatcctacaaacagacattttccactcgtgtttccatagttgttaagtgtatcagatgtgttgggcatgtgaatctccaagtgcctgtgtaataaataaagtatctttatttcattcat

SEQ ID NO: 405 - DNA, 334 bp, Homo sapiens
  misc_feature (1)...(334): n = A,T,C or G
gagctgttatactgtgagttctactaggaaatcatcaaatctgagggttgtctggaggacttcaatacacctccccccatagtgaatcagcttccagggggtccagtccctctccttacttcatccccatcccatgccaaaggaagaccctccctccttggctcacagccttctctaggcttcccagtgcctccaggacagagtgggttatgttttcagctccatccttgctgtgagtgtctggtgcggttgtgcctccagcttctgctcagtgcttcatggacagtgtccagcccatgtcactctccactctctcanngtggatcccacccct

SEQ ID NO: 406 - DNA, 216 bp, Homo sapiens
  misc_feature (1)...(216): n = A,T,C or G
tttcatacctaatgagggagttganatnacatnnaaccaggaaatgcatggatctcaanggaaacaaacacccaataaactcggagtggcagactgacaactgtgagacatgcacttgctacnaaacacaaatttnatgttgcacccttgtttctacacctgtgggttatgacaaagacaactgccaaagaatnttcaagaaggaggactgccant

SEQ ID NO: 407 - DNA, 413 bp, Homo sapiens
gctgacttgctagtatcatctgcattcattgaagcacaagaacttcatgccttgactcatgtaaatgcaataggattaaaaaataaatttgatatcacatggaaacagacaaaaaatattgtacaacattgcacccagtgtcagattctacacctggccactcaggaagcaagagttaatcccagaggtctatgtcctaatgtgttatggcaaatggatgtcatgcacgtaccttcatttggaaaattgtcatttgtccatgtgacagttgatacttattcacatttcatatgggcaacctgccagacaggagaaagtcttcccatgttaaaagacatttattatcttgttttcctgtcatgggagttccagaaaaagttaaaacagacaatgggccaggttctgtagtaaag

SEQ ID NO: 408 - DNA, 183 bp, Homo sapiens
  misc_feature (1)...(183): n = A,T,C or G
ggagctngccctcaattcctccatntctatgttancatatttaatgtcttttgnnattaatncttaactagttaatccttaaagggctanntaatccttaactagtccctccattgtgagcattatccttccagtattcnccttctnttttatttactccttcctggctacccatgtactntt

SEQ ID NO: 409 - DNA, 250 bp, Homo sapiens
  misc_feature (1)...(250): n = A,T,C or G
cccacgcatgataagctctttatttctgtaagtcctgctaggaaatcatcaaatctgacggtggtttgggggacctgaacaaacctcctgtaattaatcagctttcagtttctccccctagtccctccttcaacaacataggaggatcctccccttctttctgctcacggccttatctaggcttcccagtgcccccaggacagcgtgggctatgtttacagcgcntccttgctgggggggggccntatgc

SEQ ID NO: 410 - DNA, 306 bp, Homo sapiens
  misc_feature (1)...(306): n = A,T,C or G
ggctggtttgcaagaatgaaatgaatgattctacagctaggacttaaccttgaaatggaaagtcttgcaatcccatttgcaggatccgtctgtgcacatgcctctgtagagagcagcattcccagggaccttggaaacagttggcactgtaaggtgcttgctccccaagacacatcctaaaaggtgttgtaatggtgaaaaccgcttccttctttattgccccttcttatttatgtgaacnactggttggctttttttgnatcttttttaaactggaaagttcaattgngaaaatgaatatcntgc

SEQ ID NO: 411 - DNA, 261 bp, Homo sapiens
  misc_feature (1)...(261): n = A,T,C or G
agagatattncttaggtnaaagttcatagagttcccatgaactatatgactggccacacaggatcttttgtatttaaggattctgagattttgcttgagcaggattagataaggctgttctttaaatgtctgaaatggaacagatttcaaaaaaaaaccccacaatctagggtgggaacaaggaaggaaagatgtgaataggctgatgggcaaaaaaccaatttacccatcagttccagccttctctcaaggngaggcaaa

SEQ ID NO: 412 - DNA, 241 bp, Homo sapiens
  misc_feature (1)...(241): n = A,T,C or G
gttcaatgttacctgacatttctacaacaccccactcaccgatgtattcgttgcccagtgggaacataccagcctgaatttggaaaaaataattgtgtttcttgcccaggaaatactacgactgactttgatggctccacaaacataacccagtgtaaaaacagaagatgtggaggggagctgggagatttcactgggtacattgaattcccaaactacccangcaattacccagccaaca

SEQ ID NO: 413 - DNA, 231 bp, Homo sapiens
  misc_feature (1)...(231): n = A,T,C or G
aactcttacaatccaagtgactcatctgtgtgcttgaatcctttccactgtctcatctccctcatccaagtttctagtaccttctctttgttgtgaaggataatcaaactgaacaacaaaaagtttactctcctcatttggaacctaaaaactctcttcttcctgggtctgagggctccaagaatccttgaatcanttctcagatcattggggacaccanatcaggaacct

SEQ ID NO: 414 - DNA, 234 bp, Homo sapiens
actgtccatgaagcactgagcagaagctggaggcacaacgcaccagacactcacagcaaggatggagctgaaaacataacccactctgtcctggaggcactgggaagcctagagaaggctgtgagccaaggagggagggtcttcctttggcatgggatggggatgaagtaaggagagggactggaccccctggaagctgattcactatggggggaggtgtattgaagtcctcca

SEQ ID NO: 415 - DNA, 217 bp, Homo sapiens
  misc_feature (1)...(217): n = A,T,C or G
gcataggattaagactgagtatcttttctacattcttttaactttctaaggggcacttctcaaaacacagaccaggtagcaaatctccactgctctaaggntctcaccaccactttctcacacctagcaatagtagaattcagtcctacttctgaggccagaagaatggttcagaaaaatantggattataaaaaataacaattaagaaaaataatc

SEQ ID NO: 416 - DNA, 213 bp, Homo sapiens
  misc_feature (1)...(213): n = A,T,C or G
atgcatatntaaagganactgcctcgcttttagaagacatctggnctgctctctgcatgaggcacagcagtaaagctctttgattcccagaatcaagaactctccccttcagactattaccgaatgcaaggtggttaattgaaggccactaattgatgctcaaatagaaggatattgactatattggaacagatggagtctctactacaaaag

SEQ ID NO: 417 - DNA, 303 bp, Homo sapiens
  misc_feature (1)...(303): n = A,T,C or G
nagtcttcaggcccatcagggaagttcacactggagagaagtcatacatatgtactgtatgtgggaaaggctttactctgagttcaaatcttcaagcccatcagagagtccacactggagagaagccatacaaatgcaatgagtgtgggaagagcttcaggagggattcccattatcaagttcatctagtggtccacacaggagagaaaccctataaatgtgagatatgtgggaagggcttcantcaaagttcgtatcttcaaatccatcngaaggnccacagtatananaaaccttttaagt

SEQ ID NO: 418 - DNA, 328 bp, Homo sapiens
  misc_feature (1)...(328): n = A,T,C or G
tttttggcggtggtggggcagggacgggacangagtctcactctgttgcccaggctggagtgcacaggcatgatctcggctcactacaacccctgcctcccatgtccaagcgattcttgtgcctcagccttccctgtagctagaattacaggcacatgccaccacacccagctagtttttgtatttttagtagagacagggtttcaccatgttggccaggctggtctcaaactcctnacctcagnggtcaggctggtctcaaactcctgacctcaagtgatctgcccacctcagcctcccaaagtgctangattacaggccgtgagcc

SEQ ID NO: 419 - DNA, 389 bp, Homo sapiens
  misc_feature (1)...(389): n = A,T,C or G
cctcctcaagacggcctgtggtccgcctcccggcaaccaagaagcctgcagtgccatatgacccctgagccatggactggagcctgaaaggcagcgtacaccctgctcctgatcttgctgcttgtttcctctctgtggctccattcatagcacagttgttgcactgaggcttgtgcaggccgagcaaggccaagctggctcaaagagcaaccagtcaactctgccacggtgtgccaggcaccggttctccagccaccaacctcactcgctcccgcaaatggcacatcagttcttctaccctaaaggtaggaccaaagggcatctgcttttctgaagtcctctgctctatcagccatcacgtggcagccactcnggctgtgtcgacgcgg

SEQ ID NO: 420 - DNA, 408 bp, Homo sapiens
gttcctcctaactcctgccagaaacagctctcctcaacatgagagctgcacccctcctcctggccagggcagcaagccttagccttggcttcttgtttctgctttttttctggctagaccgaagtgtactagccaaggagttgaagtttgtgactttggtgtttcggcatggagaccgaagtcccattgacacctttcccactgaccccataaaggaatcctcatggccacaaggatttggccaactcacccagctgggcatggagcagcattatgaacttggagagtatataagaaagagatatagaaaattcttgaatgagtcctataaacatgaacaggtttatattcgaagcacagacgttgaccggactttgatgaagtgctatgacaaacctggcaagcccg

SEQ ID NO: 421 - DNA, 352 bp, Homo sapiens
  misc_feature (1)...(352): n = A,T,C or G
gctcaaaaatctttttactgatnggcatggctacacaatcattgactattacggaggccagaggagaatgaggcctggcctgggagccctgtgcctactanaagcacattagattatccattcactgacagaacaggtcttttttgggtccttcttctccaccacnatatacttgcagtcctccttcttgaagattctttggcagttgtctttgtcataacccacaggtgtagaaacaagggtgcaacatgaaatttctgtttcgtagcaagtgcatgtctcacaagttggcangtctgccactccgagtttattgggtgtttgtttcctttgagatccatgcatttcctgg

SEQ ID NO: 422 - DNA, 337 bp, Homo sapiens
atgccaccatgctggcaatgcagcgggcggtcgaaggcctgcatatccagcccaagctggcgatgatcgacggcaaccgttgcccgaagttgccgatgccagccgaagcggtggtcaagggcgatagcaaggtgccggcgatcgcggcggcgtcaatcctggccaaggtcagccgtgatcgtgaaatggcagctgtcgaattgatctacccgggttatggcatcggcgggcataagggctatccgacaccggtgcacctggaagccttgcagcggctggggccgacgccgattcaccgacgcttcttccgccggtacggctggcctatgaaaattat

SEQ ID NO: 423 - DNA, 310 bp, Homo sapiens
  misc_feature (1)...(310): n = A,T,C or G
gctcaaaaatctttttactgatatggcatggctacacaatcattgactattagaggccagaggagaatgaggcctggcctgggagccctgtgcctactanaagcncattagattatccattcactgacagaacaggtcttttttgggtccttcttctccaccacgatatacttgcagtcctccttcttgaagattctttggcagttgtctttgtcataacccacaggtgtanaaacaagggtgcaacatgaaatttctgtttcgtagcaagtgcatgtctcacagttgtcaagtctgccctccgagttta

SEQ ID NO: 424 - DNA, 370 bp, Homo sapiens
  misc_feature (1)...(370): n = A,T,C or G
gctcaaaaatctttttactgataggcatggctacacaatcattgactattagaggccagaggagaatgaggcctggcctgggagccctgtgcctactagaagcacattagattatccattcactgacagaacaggtcttttttgggtccttcttctccaccacgatatacttgcagtcctccttcttgaagattctttggcagttgtctttgtcataacccacaggtgtagaaacatcctggttgaatctcctggaactccctcattaggtatgaaatagcatgatgcattgcataaagtcacgaaggtggcaaagatcacaacgctgcccagganaacattcattgtgataagcaggactccgtcgacg

SEQ ID NO: 425 - DNA, 216 bp, Homo sapiens
  misc_feature (1)...(216): n = A,T,C or G
aattgctatnntttattttgccactcaaaataattaccaaaaaaaaaaaatnttaaatgataacaacncaacatcaaggnaaananaacaggaatggntgactntgcataaatnggccgaanattatccattatnttaagggttgacttcaggntacagcacacagacaaacatgcccaggaggntntcaggaccgctcgatgtnttntgaggagg

SEQ ID NO: 426 - DNA, 596 bp, Homo sapiens
cttccagtgaggataaccctgttgccccgggccgaggttctccattaggctctgattgattggcagtcagtgatggaagggtgttctgatcattccgactgccccaagggtcgctggccagctctctgttttgctgagttggcagtaggacctaatttgttaattaagagtagatggtgagctgtccttgtattttgattaacctaatggccttcccagcacgactcggattcagctggagacatcacggcaacttttaatgaaatgatttgaagggccattaagaggcacttcccgttattaggcagttcatctgcactgataacttcttggcagctgagctggtcggagctgtggcccaaacgcacacttggcttttggttttgagatacaactcttaatcttttagtcatgcttgagggtggatggccttttcagctttaacccaatttgcactgccttggaagtgtagccaggagaatacactcatatactcgtgggcttagaggccacagcagatgtcattggtctactgcctgagtcccgctggtcccatcccaggaccttccatcggcgagtacctgggagcccgtgct

SEQ ID NO: 427 - DNA, 107 bp, Homo sapiens
  misc_feature (1)...(107): n = A,T,C or G
gaagaattcaagttaggtttattcaaagggcttacngagaatcctanacccaggncccagcccgggagcagccttanagagctcctgtttgactgcccggctcagng

SEQ ID NO: 428 - DNA, 38 bp, Homo sapiens
  misc_feature (1)...(38): n = A,T,C or G
gaacttccnaanaangactttattcactattttacatt

SEQ ID NO: 429 - DNA, 544 bp, Homo sapiens
ctttgctggacggaataaaagtggacgcaagcatgacctcctgatgagggcgctgcatttattgaagagcggctgcagccctgcggttcagattaaaatccgagaattgtatagacgccgatatccacgaactcttgaaggactttctgatttatccacaatcaaatcatcggttttcagtttggatggtggctcatcacctgtagaacctgacttggccgtggctggaatccactcgttgccttccacttcagttacacctcactcaccatcctctcctgttggttctgtgctgcttcaagatactaagcccacatttgagatgcagcagccatctcccccaattcctcctgtccatcctgatgtgcagttaaaaaatctgcccttttatgatgtccttgatgttctcatcaagcccacgagtttagttcaaagcagtattcagcgatttcaagagaagttttttatttttgctttgacacctcaacaagttagagagatatgcatatccagggattttttgccaggtggtaggagagattat

SEQ ID NO: 430 - DNA, 507 bp, Homo sapiens
  misc_feature (1)...(507): n = A,T,C or G
cttatcncaatggggctcccaaacttggctgtgcagtggaaactccgggggaattttgaagaacactgacacccatcttccaccccgacactctgatttaattgggctgcagtgagaacagagcatcaatttaaaaagctgcccagaatgttntcctgggcagcgttgtgatctttgccnccttcgtgactttatgcaatgcatcatgctatttcatacctaatgagggagttccaggagattcaaccaggatgtttctacncctgtgggttatgacaaagacaactgccaaagaatnttcaagaaggaggactgcaagtatatcgtggtggagaagaaggacccaaaaaagacctgttctgtcagtgaatggataatctaatgtgcttctagtaggcacagggctcccaggccaggcctcattctcctctggcctctaatagtcaatgattgtgtagccatgcctatcagtaaaaagatttttgagcaaaaaaaaaaaaaaaaaaa

SEQ ID NO: 431 - DNA, 392 bp, Homo sapiens
  misc_feature (1)...(392): n = A,T,C or G
gaaaattcagaatggataaaaacaaatgaagtacaaaatatttcagatttacatagcgataaacaagaaagcacttatcaggaggacttacaaatggaagtacactctanaaccatcatctatcatggctaaatgtgagattagcacagctgtattatttgtacattgcaaacacctagaaagagatgggaaacaaaatcccaggagttttgtgtgtggagtcctgggttttccaacagacatcattccagcattctgagattagggngattggggatcattctggagttggaatgttcaacaaaagtgatgttgttaggtaaaatgtacaacttctggatctatgcagacattgaaggtgcaatgagtctggcttttactctgctgtttct

SEQ ID NO: 432 - DNA, 387 bp, Homo sapiens
  misc_feature (1)...(387): n = A,T,C or G
ggtatccntacataatcaaatatagctgtagtacatgttttcattggngtagattaccacaaatgcaaggcaacatgtgtagatctcttgtcttattcttttgtctataatactgtattgngtagtccaagctctcggnagtccagccactgngaaacatgctccctttagattaacctcgtggacnctnttgttgnattgtctgaactgtagngccctgtattttgcttctgtctgngaattctgttgcttctggggcatttccttgngatgcagaggaccaccacacagatgacagcaatctgaattgntccaatcacagctgcgattaagacatactgaaatcgtacaggaccgggaacaacgtatagaacactggagtccttt

SEQ ID NO: 433 - DNA, 281 bp, Homo sapiens
  misc_feature (1)...(281): n = A,T,C or G
ttcaactagcanagaanactgcttcagggngtgtaaaatgaaaggcttccacgcagttatctgattaaagaacactaagagagggacaaggctagaagccgcaggatgtctacactatagcaggcnctatttgggttggctggaggagctgtggaaaacatggagagattggcgctggagatcgccgtggctattcctcnttgntattacaccagngaggntctctgtntgcccactggttnnaaaaccgntatacaataatgatagaataggacacacat

SEQ ID NO: 434 - DNA, 484 bp, Homo sapiens
ttttaaaataagcatttagtgctcagtccctactgagtactctttctctcccctcctctgaatttaattctttcaacttgcaatttgcaaggattacacatttcactgtgatgtatattgtgttgcaaaaaaaaaaaagtgtctttgtttaaaattacttggtttgtgaatccatcttgctttttccccattggaactagtcattaacccatctctgaactggtagaaaaacatctgaagagctagtctatcagcatctgacaggtgaattggatggttctcagaaccatttcacccagacagcctgtttctatcctgtttaataaattagtttgggttctctacatgcataacaaaccctgctccaatctgtcacataaaagtctgtgacttgaagtttagtcagcacccccaccaaactttatttttctatgtgttttttgcaacatatgagtgttttgaaaataaagtacccatgtcttta

SEQ ID NO: 435 - DNA, 424 bp, Homo sapiens
gcgccgctcagagcaggtcactttctgccttccacgtcctccttcaaggaagccccatgtgggtagctttcaatatcgcaggttcttactcctctgcctctataagctcaaacccaccaacgatcgggcaagtaaaccccctccctcgccgacttcggaactggcgagagttcagcgcagatgggcctgtggggagggggcaagatagatgagggggagcggcatggtgcggggtgaccccttggagagaggaaaaaggccacaagaggggctgccaccgccactaacggagatggccctggtagagacctttgggggtctggaacctctggactccccatgctctaactcccacactctgctatcagaaacttaaacttgaggattttctctgtttttcactcgcaataaattcagagcaaac

SEQ ID NO: 436 - DNA, 667 bp, Homo sapiens
  misc_feature (1)...(667): n = A,T,C or G
accttgggaanactctcacaatataaagggtcgtagactttactccaaattccaaaaaggtcctggccatgtaatcctgaaagttttcccaaggtagctataaaatccttataagggtgcagcctcttctggaattcctctgatttcaaagtctcactctcaagttcttgaaaacgagggcagttcctgaaaggcaggtatagcaactgatcttcagaaagaggaactgtgtgcaccgggatgggctgccagagtaggataggattccagatgctgacaccttctgggggaaacagggctgccaggtttgtcatagcactcatcaaagtccggtcaacgtctgtgcttcgaatataaacctgttcatgtttataggactcattcaagaattttctatatctctttcttatatactctccaagttcataatgctgctccatgcccagctgggtgagttggccaaatccttgtggccatgaggattcctttatggggtcagtgggaaaggtgtcaatgggacttcggtctccatgccgaaacaccaaagtcacaaacttcaactccttggctagtacacttcggtctagccagaaaaaaagcagaaacaagaagccaaggctaaggcttgctgccctgccaggaggaggggtgcagctctcatgttgag

SEQ ID NO: 437 - DNA, 693 bp, Homo sapiens
ctacgtctcaaccctcatttttaggtaaggaatcttaagtccaaagatattaagtgactcacacagccaggtaaggaaagctggattggcacactaggactctaccataccgggttttgttaaagctcaggttaggaggctgataagcttggaaggaacttcagacagctttttcagatcataaaagataattcttagcccatgttcttctccagagcagacctgaaatgacagcacagcaggtactcctctattttcacccctcttgcttctactctctggcagtcagacctgtgggaggccatgggagaaagcagctctctggatgtttgtacagatcatggactattctctgtggaccatttctccaggttaccctaggtgtcactattggggggacagccagcatctttagctttcatttgagtttctgtctgtcttcagtagaggaaacttttgctcttcacacttcacatctgaacacctaactgctgttgctcctgaggtggtgaaagacagatatagagcttacagtatttatcctatttctaggcactgagggctgtggggtaccttgtggtgccaaaacagatcctgttttaaggacatgttgcttcagagatgtctgtaactatctgggggctctgttggctctttaccctgcatcatgtgctctcttggctgaaaatgacc

SEQ ID NO: 438 - DNA, 360 bp, Homo sapiens
ctgcttatcacaatgaatgttctcctgggcagcgttgtgatctttgccaccttcgtgactttatgcaatgcatcatgctatttcatacctaatgagggagttccaggagattcaaccaggatgtttctacacctgtgggttatgacaaagacaactgccaaagaatcttcaagaaggaggactgcaagtatatctggtggagaagaaggacccaaaaaagacctgttctgtcagtgaatggataatctaatgtgcttctagtaggcacagggctcccaggccaggcctcattctcctctggcctctaatagtcaataattgtgtagccatgcctatcagtaaaaagatttttgagcaaac

SEQ ID NO: 439 - DNA, 431 bp, Homo sapiens
  misc_feature (1)...(431): n = A,T,C or G
gttcctnntaactcctgccagaaacagctctcctcaacatgagagctgcacccctcctcctggccagggcagcaagccttagccttggcttcttgtttctgctttttttctggctagaccgaagtgtactagccaaggagttgaagtttgtgactttggtgtttcggcatggagaccgaagtcccattgacacctttcccactgaccccataaaggaatcctcatggccacaaggatttggccaactcacccagctgggcatggagcagcattatgaacttggagagtatataagaaagagatatagaaaattcttgaatgagtcctataaacatgaacaggtttatattcgaagcacagacgttgaccggactttgatgagtgctatgacaaacctggcagcccgtcgacgcggccgcgaatttagtagt

SEQ ID NO: 440 - DNA, 523 bp, Homo sapiens
agagataaagcttaggtcaaagttcatagagttcccatgaactatatgactggccacacaggatcttttgtatttaaggattctgagattttgcttgagcaggattagataaggctgttctttaaatgtctgaaatggaacagatttcaaaaaaaaaccccacaatctagggtgggaacaaggaaggaaagatgtgaataggctgatgggcaaaaaaccaatttacccatcagttccagccttctctcaaggagaggcaaagaaaggagatacagtggagacatctggaaagttttctccactggaaaactgctactatctgtttttatatttctgttaaaatatatgaggctacagaactaaaaattaaaacctctttgtgtcccttggtcctggaacatttatgttccttttaaagaaacaaaaatcaaactttacagaaagatttgatgtatgtaatacatatagcagctcttgaagtatatatatcatagcaaataagtcatctgatgagaacaagcta

SEQ ID NO: 441 - DNA, 430 bp, Homo sapiens
gttcctcctaactcctgccagaaacagctctcctcaacatgagagctgcacccctcctcctggccagggcagcaagccttagccttggcttcttgtttctgctttttttctggctagaccgaagtgtactagccaaggagttgaagtttgtgactttggtgtttcggcatggagaccgaagtcccattgacacctttcccactgaccccataaaggaatcctcatggccacaaggatttggccaactcacccagctgggcatggagcagcattatgaacttggagagtatataagaaagagatatagaaaattcttgaatgagtcctataaacatgaacaggtttatattcgaagcacagacgttgaccggactttgatgagtgctatgacaaacctggcagcccgtcgacgcggccgcgaatttagtag

SEQ ID NO: 442 - DNA, 362 bp, Homo sapiens
ctaaggaattagtagtgttcccatcacttgtttggagtgtgctattctaaaagattttgatttcctggaatgacaattatattttaactttggtgggggaaagagttataggaccacagtcttcacttctgatacttgtaaattaatcttttattgcacttgttttgaccattaagctatatgtttagaaatggtcattttacggaaaaattagaaaaattctgataatagtgcagaataaatgaattaatgttttacttaatttatattgaactgtcaatgacaaataaaaattctttttgattattttttgttttcatttaccagaataaaaactaagaattaaaagtttgattacagtc

SEQ ID NO: 443 - DNA, 624 bp, Homo sapiens
  misc_feature (1)...(624): n = A,T,C or G
ttttttttttgcaacacaatatacatcacagtgaaatgtgtaatccttgcaaattgcaagttgaaagaattaaattcagaggaggggagagaaagagtactcagtagggactgagcactaaatgcttattttaaaagaaatgtaaagagcagaaagcaattcaggctaccctgccttttgtgctggctagtactccggtcggtgtcagcagcacgtggcattgaacattgcaatgtggagcccaaaccacagaaaatggggtgaaattggccaactttctattaacttggcttcctgttttataaaatattgtgaataatatcacctacttcaaagggcagttatgaggcttaaatgaactaacgcctacaaaacacttaaacatagataacataggtgcaagtactatgtatctggtacatggtaaacatccttattattaaagtcaacgctaaaatgaatgtgtgtgcatatgctaatagtacagagagagggcacttaaaccaactaagggcctggagggaaggtttcctggaaagangatgcttgtgctgggtccaaatcttggtctactatgaccttggccaaattatttaaactttgtccctatctgctaaacagatc

SEQ ID NO: 444 - DNA, 425 bp, Homo sapiens
  misc_feature (1)...(425): n = A,T,C or G
gcacatcattnntcttgcattctttgagaataagaagatcagtaaatagttcagaagtgggaagctttgtccaggcctgtgtgtgaacccaatgttttgcttagaaatagaacaagtaagttcattgctatagcataacacaaaatttgcataagtggtggtcagcaaatccttgaatgctgcttaatgtgagaggttggtaaaatcctttgtgcaacactctaactccctgaatgttttgctgtgctgggacctgtgcatgccagacaaggccaagctggctgaaagagcaaccagccacctctgcaatctgccacctcctgctggcaggatttgtttttgcatcctgtgaagagccaaggaggcaccagggcataagtgagtagacttatggtcgacgcggccgcgaatttagtagtagtaga

SEQ ID NO: 445 - DNA, 414 bp, Homo sapiens
  misc_feature (1)...(414): n = A,T,C or G
catgtttatgnttttggattactttgggcacctagtgtttctaaatcgtctatcattcttttctgtttttcaaaagcagagatggccagagtctcaacaaactgtatcttcaagtctttgtgaaattctttgcatgtggcagattattggatgtagtttcctttaactagcatataaatctggtgtgtttcagataaatgaacagcaaaatgtggtggaattaccatttggaacattgtgaatgaaaaattgtgtctctagattatgtaacaaataactatttcctaaccattgatctttggatttttataatcctactcacaaatgactaggcttctcctcttgtattttgaagcagtgtgggtgctggattgataaaaaaaaaaaaagtcgacgcggccgcgaatttagtag

SEQ ID NO: 446 - DNA, 631 bp, Homo sapiens
  misc_feature (1)...(631): n = A,T,C or G
acaaattagaanaaagtgccagagaacaccacataccttgtccggaacattacaatggcttctgcatgcatgggaagtgtgagcattctatcaatatgcaggagccatcttgcaggtgtgatgctggttatactggacaacactgtgaaaaaaaggactacagtgttctatacgttgttcccggtcctgtacgatttcagtatgtcttaatcgcagctgtgattggaacaattcagattgctgtcatctgtgtggtggtcctctgcatcacaagggccaaactttaggtaatagcattggactgagatttgtaaactttccaaccttccaggaaatgccccagaagcaacagaattcacagacagaagcaaaatacagggcactacagttcagacaatacaacaagagcgtccacgaggttaatctaaagggagcatgtttcacagtggctggactaccgagagcttggactacacaatacagtattatagacaaaagaataagacaagagatctacacatgttgccttgcatttgtggtaatctacaccaatgaaaacatgtactacagctatatttgattatgtatggatatatttgaaatagtatacattgtcttgatgttttttctg

SEQ ID NO: 447 - DNA, 585 bp, Homo sapiens
  misc_feature (1)...(585): n = A,T,C or G
ccttgggaaaantntcacaatataaagggtcgtagactttactccaaattccaaaaaggtcctggccatgtaatcctgaaagttttcccaaggtagctataaaatccttataagggtgcagcctcttctggaattcctctgatttcaaagtctcactctcaagttcttgaaaacgagggcagttcctgaaaggcaggtatagcaactgatcttcagaaagaggaactgtgtgcaccgggatgggctgccagagtaggataggattccagatgctgacaccttctgggggaaacagggctgccaggtttgtcatagcactcatcaaagtccggtcaacgtctgtgcttcgaatataaacctgttcatgtttataggactcattcaagaattttctatatctctttcttatatactctccaagttcataatgctgctccatgcccagctgggtgagttggccaaatccttgtggccatgaggattcctttatggggtcagtgggaaaggtgtcaatgggacttcggtctccatgccgaaacaccaaagtcacaaacttcaactccttggctagtacacttcggtcta

SEQ ID NO: 448 - DNA, 93 bp, Homo sapiens
  misc_feature (1)...(93): n = A,T,C or G
tgctcgtgggtcattctgannnccgaactgaccntgccagccctgccgangggccnccatggctccctagtgccctggagagganggggctag

SEQ ID NO: 449 - DNA, 706 bp, Homo sapiens
  misc_feature (1)...(706): n = A,T,C or G
ccaagttcatgctntgtgctggacgctggacagggggcaaaagcnnttgctcgtgggtcattctgancaccgaactgaccatgccagccctgccgatggtcctccatggctccctagtgccctggagaggaggtgtctagtcagagagtagtcctggaaggtggcctctgngaggagccacggggacagcatcctgcagatggtcgggcgcgtcccattcgccattcaggctgcgcaactgttgggaagggcgatcggtgcgggcctcttcgctattacgccagctggcgaaagggggatgtgctgcaaggcgattaagttgggtaacgccagggttttcccagtcncgacgttgtaaaacgacggccagtgaattgaatttaggtgacnctatagaagagctatgacgtcgcatgcacgcgtacgtaagcttggatcctctagagcggccgcctactactactaaattcgcggccgcgtcgacgtgggatccncactgagagagtggagagtgacatgtgctggacnctgtccatgaagcactgagcagaagctggaggcacaacgcnccagacactcacagctactcaggaggctgagaacaggttgaacctgggaggtggaggttgcaatgagctgagatcaggccnctgcnccccagcatggatgacagagtgaaactccatcttaaaaaaaaaaaaaaaaa

SEQ ID NO: 450 - DNA, 493 bp, Homo sapiens
gagacggagtgtcactctgttgcccaggctggagtgcagcaagacactgtctaagaaaaaacagttttaaaaggtaaaacaacataaaaagaaatatcctatagtggaaataagagagtcaaatgaggctgagaactttacaaagggatcttacagacatgtcgccaatatcactgcatgagcctaagtataagaacaacctttggggagaaaccatcatttgacagtgaggtacaattccaagtcaggtagtgaaatgggtggaattaaactcaaattaatcctgccagctgaaacgcaagagacactgtcagagagttaaaaagtgagttctatccatgaggtgattccacagtcttctcaagtcaacacatctgtgaactcacagaccaagttcttaaaccactgttcaaactctgctacacatcagaatcacctggagagctttacaaactcccattgccgagggtcgacgcggccgcgaatttagtag

SEQ ID NO: 451 - DNA, 501 bp, Homo sapiens
  misc_feature (1)...(501): n = A,T,C or G
gggcgcgtcccattcgccattcaggctgcgcaactgttgggaagggcgatcggtgcgggcctcttcgctattacgccagctggcgaaagggggatgtgctgcaaggcgattaagttgggtaacgccagggttttcccagtcncgacgttgtaaaacgacggccagtgaattgaatttaggtgacnctatagaagagctatgacgtcgcatgcacgcgtacgtaagcttggatcctctagagcggccgcctactactactaaattcgcggccgcgtcgacgtgggatccncactgagagagtggagagtgacatgtgctggacnctgtccatgaagcactgagcagaagctggaggcacaacgcnccagacactcacagctactcaggaggctgagaacaggttgaacctgggaggtggaggttgcaatgagctgagatcaggccnctgcnccccagcatggatgacagagtgaaactccatcttaaaaaaaaaaaaaaaaa

SEQ ID NO: 452 - DNA, 51 bp, Homo sapiens
  misc_feature (1)...(51): n = A,T,C or G
agacggtttcaccnttacaacnccttttaggatgggnnttggggagcaagc

SEQ ID NO: 453 - DNA, 317 bp, Homo sapiens
  misc_feature (1)...(317): n = A,T,C or G
tacatcttgctttttccccattggaactagtcattaacccatctctgaactggtagaaaaacatctgaagagctagtctatcagcatctggcaagtgaattggatggttctcagaaccatttcacccanacagcctgtttctatcctgtttaataaattagtttgggttctctacatgcataacaaaccctgctccaatctgtcacataaaagtctgtgacttgaagtttantcagcacccccaccaaactttatttttctatgtgttttttgcaacatatgagtgttttgaaaataaggtacccatgtctttatta

SEQ ID NO: 454 - DNA, 231 bp, Homo sapiens
ttcgaggtacaatcaactctcagagtgtagtttccttctatagatgagtcagcattaatataagccacgccacgctcttgaaggagtcttgaattctcctctgctcactcagtagaaccaagaagaccaaattcttctgcatcccagcttgcaaacaaaattgttcttctaggtctccacccttcctttttcagtgttccaaagctcctcacaatttcatgaacaacagct

SEQ ID NO: 455 - DNA, 231 bp, Homo sapiens
taccaaagagggcataataatcagtctcacagtagggttcaccatcctccaagtgaaaaacattgttccgaatgggctttccacaggctacacacacaaaacaggaaacatgccaagtttgtttcaacgcattgatgacttctccaaggatcttcctttggcatcgaccacattcaggggcaaagaatttctcatagcacagctcacaatacagggctcctttctcctcta

SEQ ID NO: 456 - DNA, 231 bp, Homo sapiens
ttggcaggtacccttacaaagaagacaccataccttatgcgttattaggtggaataatcattccattcagtattatcgttattattcttggagaaaccctgtctgtttactgtaaccttttgcactcaaattcctttatcaggaataactacatagccactatttacaaagccattggaacctttttatttggtgcagctgctagtcagtccctgactgacattgccaagt

SEQ ID NO: 457 - DNA, 231 bp, Homo sapiens
  misc_feature (1)...(231): n = A,T,C or G
cgaggtacccaggggtctgaaaatctctnntttantagtcgatagcaaaattgttcatcagcattccttaatatgatcttgctataattagatttttctccattagagttcatacagttttatttgattttattagcaatctctttcagaagacccttgagatcattaagctttgtatccagttgtctaaatcgatgcctcatttcctctgaggtgtcgctggcttttgtg

SEQ ID NO: 458 - DNA, 231 bp, Homo sapiens
aggtctggttccccccacttccactcccctctactctctctaggactgggctgggccaagagaagaggggtggttagggaagccgttgagacctgaagccccaccctctaccttccttcaacaccctaaccttgggtaacagcatttggaattatcatttgggatgagtagaatttccaaggtcctgggttaggcattttggggggccagaccccaggagaagaagattct

SEQ ID NO: 459 - DNA, 231 bp, Homo sapiens
ggtaccgaggctcgctgacacagagaaaccccaacgcgaggaaaggaatggccagccacaccttcgcgaaacctgtggtggcccaccagtcctaacgggacaggacagagagacagagcagccctgcactgttttccctccaccacagccatcctgtccctcattggctctgtgctttccactatacacagtcaccgtcccaatgagaaacaagaaggagcaccctccaca

SEQ ID NO: 460 - DNA, 231 bp, Homo sapiens
gcaggtataacatgctgcaacaacagatgtgactaggaacggccggtgacatggggagggcctatcaccctattcttgggggctgcttcttcacagtgatcatgaagcctagcagcaaatcccacctccccacacgcacacggccagcctggagcccacagaagggtcctcctgcagccagtggagcttggtccagcctccagtccacccctaccaggcttaaggatagaa

SEQ ID NO: 461 - DNA, 231 bp, Homo sapiens
cgaggtttgagaagctctaatgtgcaggggagccgagaagcaggcggcctagggagggtcgcgtgtgctccagaagagtgtgtgcatgccagaggggaaacaggcgcctgtgtgtcctgggtggggttcagtgaggagtgggaaattggttcagcagaaccaagccgttgggtgaataagagggggattccatggcactgatagagccctatagtttcagagctgggaatt

SEQ ID NO: 462 - DNA, 231 bp, Homo sapiens
aggtaccctcattgtagccatgggaaaattgatgttcagtggggatcagtgaattaaatggggtcatgcaagtataaaaattaaaaaaaaaagacttcatgcccaatctcatatgatgtggaagaactgttagagagaccaacagggtagtgggttagagatttccagagtcttacattttctagaggaggtatttaatttcttctcactcatccagtgttgtatttagga

SEQ ID NO: 463 - DNA, 231 bp, Homo sapiens
tactccagcctggtgacagagcgagaccctatcaccgccccccaccccaccaaaaaaaaaactgagtagacaggtgtcctcttggcatggtaagtcttaagtcccctcccagatctgtgacatttgacaggtgtcttttcctctggacctcggtgtccccatctgagtgagaaaaggcagtggggaggtggatcttccagtcgaagcggtatagaagcccgtgtgaaaagc

SEQ ID NO: 464 - DNA, 231 bp, Homo sapiens
gtactctaagattttatctaagttgccttttctgggtgggaaagtttaaccttagtgactaaggacatcacatatgaagaatgtttaagttggaggtggcaacgtgaattgcaaacagggcctgcttcagtgactgtgtgcctgtagtcccagctactcgggagtctgtgtgaggccaggggtgccagcgcaccagctagatgctctgtaacttctaggccccattttccc

SEQ ID NO: 465 - DNA, 231 bp, Homo sapiens
catgttgttgtagctgtggtaatgctggctgcatctcagacagggttaacttcagctcctgtggcaaattagcaacaaattctgacatcatatttatggtttctgtatctttgttgatgaaggatggcacaatttttgcttgtgttcataatatactcagattagttcagctccatcagataaactggagacatgcaggacattagggtagtgttgtagctctggtaatga

SEQ ID NO: 466 - DNA, 231 bp, Homo sapiens
caggtacctctttccattggatactgtgctagcaagcatgctctccggggtttttttaatggccttcgaacagaacttgccacatacccaggtataatagtttctaacatttgcccaggacctgtgcaatcaaatattgtggagaattccctagctggagaagtcacaaagactataggcaataatggagaccagtcccacaagatgacaaccagtcgttgtgtgcggctg

SEQ ID NO: 467 - DNA, 311 bp, Homo sapiens
gtacaccctggcacagtccaatctgaactggttcggcactcatctttcatgagatggatgtggtggcttttctcctttttcatcaagactcctcagcagggagcccagaccagcctgcactgtgccttaacagaaggtcttgagattctaagtgggaatcatttcagtgactgtcatgtggcatgggtctctgcccaagctcgtaatgagactatagcaaggcggctgtgggacgtcagttgtgacctgctgggcctcccaatagactaacaggcagtgccagttggacccaagagaagactgcagcagac

SEQ ID NO: 468 - DNA, 3112 bp, Homo sapiens
cattgtgttgggagaaaaacagaggggagatttgtgtggctgcagccgagggagaccaggaagatctgcatggtgggaaggacctgatgatacagagtttgataggagacaattaaaggctggaaggcactggatgcctgatgatgaagtggactttcaaactggggcactactgaaacgatgggatggccagagacacaggagatgagttggagcaagctcaataacaaagtggttcaacgaggacttggaattgcatggagctggagctgaagtttagcccaattgtttactagttgagtgaatgtggatgattggatgatcatttctcatctctgagcctcaggttccccatccataaaatgggatacacagtatgatctataaagtgggatatagtatgatctacttcactgggttatttgaaggatgaattgagataatttatttcaggtgcctagaacaatgcccagattagtacatttggtggaactgagaaatggcataacaccaaatttaatatatgtcagatgttactatgattatcattcaatctcatagttttgtcatggcccaatttatcctcacttgtgcctcaacaaattgaactgttaacaaaggaatctctggtcctgggtaatggctgagcaccactgagcatttccattccagttggcttcttgggtttgctagctgcatcactagtcatcttaaataaatgaagttttaacatttctccagtgatttttttatctcacctttgaagatactatgttatgtgattaaataaagaacttgagaagaacaggtttcattaaacataaaatcaatgtagacgcaaattttctggatgggcaatacttatgttcacaggaaatgctttaaaatatgcagaagataattaaatggcaatggacaaagtgaaaaacttagactttttttttttttttggaagtatctggatgttccttagtcacttaaaggagaactgaaaaatagcagtgagttccacataatccaacctgtgagattaaggctctttgtggggaaggacaaagatctgtaaatttacagtttccttccaaagccaacgtcgaattttgaaacatatcaaagctcttcttcaagacaaataatctatagtacatctttcttatgggatgcacttatgaaaaatggtggctgtcaacatctagtcactttagctctcaaaatggttcattttaagagaaagttttagaatctcatatttattcctgtggaaggacagcattgtggcttggactttataaggtctttattcaactaaataggtgagaaataagaaaggctgctgactttaccatctgaggccacacatctgctgaaatggagataattaacatcactagaaacagcaagatgacaatataatgtctaagtagtgacatgtttttgcacatttccagcccctttaaatatccacacacacaggaagcacaaaaggaagcacagagatccctgggagaaatgcccggccgccatcttgggtcatcgatgagcctcgccctgtgcctggtcccgcttgtgagggaaggacattagaaaatgaattgatgtgttccttaaaggatgggcaggaaaacagatcctgttgtggatatttatttgaacgggattacagatttgaaatgaagtcacaaagtgagcattaccaatgagaggaaaacagacgagaaaatcttgatggcttcacaagacatgcaacaaacaaaatggaatactgtgatgacatgaggcagccaagctggggaggagataaccacggggcagagggtcaggattctggccctgctgcctaaactgtgcgttcataaccaaatcatttcatatttctaaccctcaaaacaaagctgttgtaatatctgatctctacggttccttctgggcccaacattctccatatatccagccacactcatttttaatatttagttcccagatctgtactgtgacctttctacactgtagaataacattactcattttgttcaaagacccttcgtgttgctgcctaatatgtagctgactgtttttcctaaggagtgttctggcccaggggatctgtgaacaggctgggaagcatctcaagatctttccagggttatacttactagcacacagcatgatcattacggagtgaattatctaatcaacatcatcctcagtgtctttgcccatactgaaattcatttcccacttttgtgcccattctcaagacctcaaaatgtcattccattaatatcacaggattaacttttttttttaacctggaagaattcaatgttacatgcagctatgggaatttaattacatattttgttttccagtgcaaagatgactaagtcctttatccctcccctttgtttgattttttttccagtataaagttaaaatgcttagccttgtactgaggctgtatacagccacagcctctccccatccctccagccttatctgtcatcaccatcaacccctcccatgcacctaaacaaaatctaacttgtaattccttgaacatgtcaggcatacattattccttctgcctgagaagctcttccttgtctcttaaatctagaatgatgtaaagttttgaataagttgactatcttacttcatgcaaagaagggacacatatgagattcatcatcacatgagacagcaaatactaaaagtgtaatttgattataagagtttagataaatatatgaaatgcaagagccacagagggaatgtttatggggcacgtttgtaagcctgggatgtgaagcaaaggcagggaacctcatagtatcttatataatatacttcatttctctatctctatcacaatatccaacaagcttttcacagaattcatgcagtgcaaatccccaaaggtaacctttatccatttcatggtgagtgcgctttagaattttggcaaatcatactggtcacttatctcaactttgagatgtgtttgtccttgtagttaattgaaagaaatagggcactcttgtgagccactttagggttcactcctggcaataaagaatttacaaagagcaaaaaaaaaaaaaaaaaaaaaaaa

SEQ ID NO: 469 - DNA, 2229 bp, Homo sapiens
agctctttgtaaattctttattgccaggagtgaaccctaaagtggctcacaagagtgccctatttctttcaattaactacaaggacaaacacatctcaaagttgagataagtgaccagtatgatttgccaaaattctaaagcgcactcaccatgaaatggataaaggttacctttggggatttgcactgcatgaattctgtgaaaagcttgttggatattgtgatagagatagagaaatgaagtatattatataagatactatgaggttccctgcctttgcttcacatcccaggcttacaaacgtgccccataaacattccctctgtggctcttgcatttcatatatttatctaaactcttataatcaaatacacttttagtatttgctgtctcatgtgatgatgaatctcatatgtgtcccttctttgcatgaagtaagatagtcaacttattcaaaactttacatcattctagatttaagagacaaggaagagcttctcaggcagaaggaataatgtatgcctgacatgttcaaggaattacaagttagattttgtttaggtgcatgggaggggttgatggtgatgacagataaggctggagggatggggagaggctgtggctgtatacagcctcagtacaaggctaagcattttaactttatactggaaaaaaaatcaaacaaaggggagggataaaggacttagtcatctttgcactggaaaacaaaatatgtaattaaattcccatagctgcatgtaacattgaattcttccaggttaaaaaaaaagttaatcctgtgatattaatggaatgacattttgaggtcttgagaatgggcacaaaagtgggaaatgaatttcagtatgggcaaagacactgaggatgatgttgattagataattcactccgtaatgatcatgctgtgtgctagtaagtataaccctggaaagatcttgagatgcttcccagcctgttcacagatcccctgggccagaacactccttaggaaaaacagtcagctacatattaggcagcaacacgaagggtctttgaacaaaatgagtaatgttattctacagtgtagaaaggtcacagtacagatctgggaactaaatattaaaaatgagtgtggctggatatatggagaatgttgggcccagaaggaaccgtagagatcagatattacaacagctttgttttgagggttagaaatatgaaatgatttggttatgaacgcacagtttaggcagcagggccagaatcctgaccctctgccccgtggttatctcctccccagcttggctgcctcatgtcatcacagtattccattttgtttgttgcatgtcttgtgaagccatcaagattttctcgtctgttttcctctcattggtaatgctcactttgtgacttcatttcaaatctgtaatcccgttcaaataaatatccacaacaggatctgttttcctgcccatcctttaaggaacacatcaattcattttctaatgtccttccctcacaagcgggaccaggcacagggcgaggctcatcgatgacccaagatggcggccgggcatttctcccagggatctctgtgcttccttttgtgcttcctgtgtgtgtggatatttaaaggggctggaaatgtgcaaaaacatgtcactacttagacattatattgtcatcttgctgtttctagtgatgttaattatctccatttcagcagatgtgtggcctcagatggtaaagtcagcagcctttcttatttctcacctggaaatacatacgaccatttgaggagacaaatggcaaggtgtcagcataccctgaacttgagttgagagctacacacaatattattggtttccgagcatcacaaacaccctctctgtttcttcactgggcacagaattttaatacttatttcagtgggctgttggcaggaacaaatgaagcaatctacataaagtcactagtgcagtgcctgacacacaccattctcttgaggtcccctctagagatcccacaggtcatatgacttcttggggagcagtggctcacacctgtaatcccagcactttgggaggctgaggcaggtgggtcacctgaggtcaggagttcaagaccagcctggccaatatggtgaaaccccatctctactaaaaatacaaaaattagctgggcgtgctggtgcatgcctgtaatcccagccccaacacaatggaatt

SEQ ID NO: 470 - DNA, 2426 bp, Homo sapiens
gtaaattctttattgccaggagtgaaccctaaagtggctcacaagagtgccctatttctttcaattaactacaaggacaaacacatctcaaagttgagataagtgaccagtatgatttgccaaaattctaaagcgcactcaccatgaaatggataaaggttacctttggggatttgcactgcatgaattctgtgaaaagcttgttggatattgtgatagagatagagaaatgaagtatattatataagatactatgaggttccctgcctttgcttcacatcccaggcttacaaacgtgccccataaacattccctctgtggctcttgcatttcatatatttatctaaactcttataatcaaattacacttttagtatttgctgtctcatgtgatgatgaatctcatatgtgtcccttctttgcatgaagtaagatagtcaacttattcaaaactttacatcattctagatttaagagacaaggaagagcttctcaggcagaaggaataatgtatgcctgacatgttcaaggaattacaagttagattttgtttaggtgcatgggaggggttgatggtgatgacagataaggctggagggatggggagaggctgtggctgtatacagcctcagtacaaggctaagcattttaactttatactggaaaaaaaatcaaacaaaggggagggataaaggacttagtcatctttgcactggaaaacaaaatatgtaattaaattcccatagctgcatgtaacattgaattcttccaggttaaaaaaaaaagttaatcctgtgatattaatggaatgacattttgaggtcttgagaatgggcacaaaagtgggaaatgaatttcagtatgggcaaagacactgaggatgatgttgattagataattcactccgtaatgatcatgctgtgtgctagtaagtataaccctggaaagatcttgagatgcttcccagcctgttcacagatcccctgggccagaacactccttaggaaaaacagtcagctacatattaggcagcaacacgaagggtctttgaacaaaatgagtaatgttattctacagtgtagaaaggtcacagtacagatctgggaactaaatattaaaaatgagtgtggctggatatatggagaatgttgggcccagaaggaaccgtagagatcagatattacaacagctttgttttgagggttagaaatatgaaatgatttggttatgaacgcacagtttaggcagcagggccagaatcctgaccctctgccccgtggttatctcctccccagcttggctgcctcatgtcatcacagtattccattttgtttgttgcatgtcttgtgaagccatcaagattttctcgtctgttttcctctcattggtaatgctcactttgtgacttcatttcaaatctgtaatcccgttcaaataaatatccacaacaggatctgttttcctgcccatcctttaaggaacacatcaattcattttctaatgtccttccctcacaagcgggaccaggcacagggcgaggctcatcgatgacccaagatggcggccgggcatttctcccagggatctctgtgcttccttttgtgcttcctgtgtgtgtggatatttaaaggggctggaaatgtgcaaaaacatgtcactacttagacattatattgtcatcttgctgtttctagtgatgttaattatctccatttcagcagatgtgtggcctcagatggtaaagtcagcagcctttcttatttctcacctggaaatacatacgaccatttgaggagacaaatggcaaggtgtcagcataccctgaacttgagttgagagctacacacaatattattggtttccgagcatcacaaacaccctctctgtttcttcactgggcacagaattttaatacttatttcagtgggctgttggcaggaacaaatgaagcaatctacataaagtcactagtgcagtgcctgacacacaccattctcttgaggtcccctctagagatcccacaggtcatatgacttcttggggagcagtggctcacacctgtaatcccagcactttgggaggctgaggcaggtgggtcacctgaggtcaggagttcaagaccagcctggccaatatggtgaaaccccatctctactaaaaatacaaaaattagctgggcgtgctggtgcatgcctgtaatcccagctacttgggaggctgaggcaggagaattgctggaacatgggaggcggaggttgcagtgagctgtaattgtgccattgcactcgaacctgggcgacagagtggaactctgtttccaaaaaacaaacaaacaaaaaaggcatagtcagatacaacgtgggtgggatgtgtaaatagaagcaggatataaagggcatggggtgacggttttgcccaacacaatg

SEQ ID NO: 471 - DNA, 812 bp, Homo sapiens
gaacaaaatgagtaatgttattctacagtgtagaaaggtcacagtacagatctgggaactaaatattaaaaatgagtgtggctggatatatggagaatgttgggcccagaaggaaccgtagagatcagatattacaacagctttgttttgagggttagaaatatgaaatgatttggttatgaacgcacagtttaggcagcagggccagaatcctgaccctctgccccgtggttatctcctccccagcttggctgcctcatgtcatcacagtattccattttgtttgttgcatgtcttgtgaagccatcaagattttctcgtctgttttcctctcattggtaatgctcactttgtgacttcatttcaaatctgtaatcccgttcaaataaatatccacaacaggatctgttttcctgcccatcctttaaggaacacatcaattcattttctaatgtccttccctcacaagcgggaccaggcacagggcgaggctcatcgatgacccaagatggcggccgggcatttctcccagggatctctgtgcttccttttgtgcttcctgtgtgtgtggatatttaaaggggctggaaatgtgcaaaaacatgtcactacttagacattatattgtcatcttgctgtttctagtgatgttaattatctccatttcagcagatgtgtggcctcagatggtaaagtcagcagcctttcttatttctcacctctgtatcatcaggtccttcccaccatgcagatcttcctggtctccctcggctgcagccacacaaatctcccctctgtttttctgatgccag

SEQ ID NO: 472 - DNA, 515 bp, Homo sapiens
  misc_feature (1)...(515): n = A,T,C or G
acggagacttattttctgatattgtctgcatatgtatgtttttaagagtctggaaatagtcttatgactttcctatcatgcttattaataaataatacagcccagagaagatgaaaatgggttccagaattattggtccttgcagcccggtgaatctcagcaagaggaaccaccaactgacaatcaggatattgaacctggacaagagagagaaggaacacctccgatcgaagaacgtaaagtagaaggtgattgccaggaaatggatctggaaaagactcggagtgagcgtggagatggctctgatgtaaaagagaagactccacctaatcctaagcatgctaagactaaagaagcaggagatgggcagccataagttaaaaagaagacaagctgaagctacacacatggctgatgtcacattgaaaatgtgactgaaaatttgaaaattctctcaataaagtttgagttttctctgaagaaaaaaaaanaaaaaaaaaaaanaaaaanaaaaa

SEQ ID NO: 473 - DNA, 5829 bp, Homo sapiens
cgcatgccggggaagcccaagctggctcgaagagccaccagccacctgtgcaagggtgggcctggaccagttggaccagccaccaagctcacctactcaaggaagcagggatggccaggttgcaacagcctgagtggctgccacctgatagctgatggagcagaggcctgaggaaaatcagatggcacatttagctctttaatggatcttaagttaatttttctataaagcacatggcaccagtccatgcctcagagctcgtatggcactgcggaccacagcaggccgagttcccaggattgccatccaggggggccttctgtagccctggccagaccttgcagaggtggctgggtgctctttgagcgagctcggcctccctggcatgcacaggccccaggtactgacacgctgctctgagtgagcttgtcctgccttggctgccacctaactgctgatggagcagcggccttaggaaaagcaaatggcgctgtagcccaactttagggtagaagaagatgtaccatgtccggccgctagttggtgactggtgcacctgctcctggcgtacccttgcagaggtgggtggttgctctttggccagcttggccttgcctggcatgcacaagcctcagtgcaacaactgtcctacaaatggagacacagagaggaaacaagcagcgggctcaggagcagggtgtgtgctgcctttggggctccagtccatgcctcgggtcgtatggtactgcaggcttcttggttgccaagaggcggaccacaggccttcttgaggaggactttacgttcaagtgcagaaagcagccaaaattaccatccatgagactaagccttctgtggccctggcgagacttaaaatttgtgccaaggcaggacaagctcactcggagcagcgtgtcagtagctggggcctatgcatgccgggcagggccgggctggctgaaggagcaaccagccacctctgcaagggtgcgcctagtgcaggcggagcatccaccacctcacccgctcgaggaagtggggatggccaggttcccacagcctgagtgtctgccaccttattgctgatggagcagaggccttaagaaaagcagatggcactgtggccctacctttagggtggaagaagtgatgtacatgtccggacgctaattggtgactggtacaccggctcctgctacacctttgcagaggtggctggttgctctttgagccagcttgtccttgcccggcatgcacaagtttcagtgcaacaactttgccacaaatggagccatatagaggaaacaagaagcaggttcaggagaagggtgtaccctgcctttggggctccagtccatgcctcaggtgtcacatggcactgcgggcttcttggttgccaggaggcggaccacaggccatcttggggaggactttgtgttcaagtgcagaaagcagccaggattgccatccagggggaccttctatagccctggccaaaccttgcaggggtgtctggttgctctttgagccggcttggcctccctggcatgcacgggccccaggtgctggcacgctgctccgagtgtgcttgtcctgccttggctgccacctctgcgggggtgcgtctggagggggtggaccggccaccaaccttacccagtcaaggaagtggatggccatgttcccacagcctgagtggctgccacctgatggctgatggagcaaaggccttaggaaaagcagatggcccttggccctacctttttgttagaagaactgatgttccatgtcctgcagcgagtgaggttggtggctgtgcccccagctcctggcgcgccctcgcagaggtgactggttgctctttgggccctcttggccttgcccagcatgcacaagcctcagtgctactactgtgctacaaatggagccatataggggaaacgagcagccatctcaggagcaaggtgtatgctgcctttgggggctccagtccttgcctcaagggtcttatgtcactgtgggcttcttggttgtcaagaggcagaccataggccgtcttgagagggactttatgttcaagtgcagaaagcagccaggattgccaccctcgggactctgccttctgtggccctggccaaacttagaatttggccgtagacaggacaggctcacttggagtagcgtgtccgtagctggggtctgtgcatgccgggcaaggccgggctggctcggggagcaaccagccacctctgcgggggtgcgcctggagcaggtggagcagccaccagctcacccactccaggaagccggggtagccaggttcccaaggcctgagtgggtgccacctaatggctgaagaaacagaggccttgggaaaaccagatggcactgtggccctacctttatggtagaagagctgatttagcctgactggcagcgtgtggggttggtggctggtctgcctgctgctggcgcatccgtgcaaggatggctggttgccctttgagccagcttgcccttgcccggcatgcgcaagcctcagtgcaacaactgtgctgcaaatggggccatatagaggaaaggagcagctggctctggagcatggtgtgcactccctttgggccttcagtccatgtctcatgggtcgtatgacactgcgggcttgttggttgccaagaggcagaccacaggtcatcttgaggaggactttatgttccagtccagaaagcagccagtggtaccacccaggggacttgtgcttctgtgcccaggccagacgtagaatttgacaaagtcaggacggtctcagtcagagcggcgtgtcggtccccggggcctgtgcatgccgggcagggccgggctggcttggggagcaagcagccacctctgttaagggtgtgcctggagcaggtggagcagccaccaacctcacgcactgaaagaagcagggatggccaggttccaacatcctgagtggctgccacctgatggctgatggagcagaggcctgaggaaaagcagatggcactgctttgtagtgctgttctttgtctctcttgatctttttcagttaatgtctgttttatcagagactaggattgcaaaccctgctcttttttgctttccatttgcttggtaaatattcctccatccctttattttaagcctatgtgtgtctttgcacatgagatgggtctcctgaatacaggacaacaatgggtctttactctttatccaacttgccagtctgtgtcttttaactggggcatttagcccatttacatttaagtttagtattgttacatgtgaaatttatcctgtcatgatgttgctagctttttatttttcccattagtttgcagtttctttatagtgtcaatggtctttacaattcgatatgtttttgtagtggctggtactggtttttcctttctacgtttagtgtctccttcaggagctcttgtaacacaagaatgtggatttatttcttgtaaggtaaatatgtggatttatttcttgggactgtattctatggcctttaccccaagaatcattactttttaaaatgcaattcaaattagcataaaacatttacagcctatggaaaggcttgtggcattagaatccttatttataggattattttgtgtttttttgagatatggtctttgtcatcgaggcagaagtgccgtggtttgatcataattcaccacagccctgaactcttgagtccaagccatccttttgccttaatctcccaaccagttggatctgcaggcataaggcatcatgcgtggctaattttttcacgttttttttttttttttgtcgagattatggtgtcactgtgttgctctggctgatctcaaatgtttgacctcaagggatctttctgccacggcctcctaaagtgctaggattatatgcatgatacaccatgcctattgtagagtattacattattttcaaagtcttattgtaagagccatttattgcctttggcctaaataactcaatataatatctctgaaacttttttttgacaaattttggggcgtgatgatgagagaagggggtttgaaactttctaataagagttaacttagagccatttaagaaaggaaaaaacacaaattatcagaaaaacaacagtaagatcaagtgcaaaagttctgtggcaaagatgatgagagtaaagaatatatgtttgtgactcatggtggcttttactttgttcttgaatttctgagtacgggttaacatttaaagaatctacattatagataacattttattgcaagtaaatgtatttcaaaatttgttattggttttgtatgagattattctcagcctacttcattatcaagctatattattttattaatgtagttcgatgatcttacagcaaagctgaaagctgtatcttcaaaatatgtctatttgactaaaaagttattcaacaggagttattatctataaaaaaaatacaacaggaatataaaaaacttgaggataaaaagatgttggaaaaagtaatattaaatcttaaaaaacatatggaaactacacaatggtgaagacacattggtgaagtacaaaaatataaattggatctagaagaaagggcaatgcaggcaatagaaaaattagtagaaatccctttaaaggttagtttgtaaaatcaggtaagtttatttataatttgctttcatttatttcactgcaaattatattttggatatgtatatatattgtgcttcctctgcctgtcttacagcaatttgccttgcagagttctaggaaaaaggtggcatgtgtttttactttcaaaatatttaaatttccatcattataacaaaatcaatttttcagagtaatgattctcactgtggagtcatttgattattaagacccgttggcataagattacatcctctgactataaaaatcctggaagaaaacctaggaaatattcgtctggacattgcacttggcaatgaatttatgggtaaccactgatccacttccagtcactatccatgagtttttatttccagatacatgaaatcatatgagttgaaactttcttttgattgagcagtttggaaaccgtctttttgtagaatctgcaagtggatatttggaaccctttgaggcctatgctgaaaaaagaaatatcttcactacatgatgaccaccagcagcagctggggaaaccagcaccctgtggaattccatacggtgcatagaatacatcctcccttcagtcggcttgggtcaacttaggtcatgggccacctggctgatagcagtttccacagaaatgcttcaagatgaaagtggatgaccgggccaccctccaccactgccctgtaagaccatgggacacacaggccaccagttcttttcatgtggtcatcccctgttagatgggagaaaatacacctgcctcatttttgtaccttctgtgtgaacattccacggcagactgtcgctaaatgtggatgaagaattgaatgaatgaatgaatatgagagaaaatgaataaatggttcagatcctgggctggaaggctgtgtatgaggatggtgggtagaggagggtctgtttttcttgcctttaagtcactaattgtcactttggggcaggagcacaggctttgaatgcagaccgactggactttaattctggctttactagttgtgattgtgtgaccttgtgaaagttacttaaaccctctgtgcctgtttctttatctgtaaaatggagataataagatgtcaaaggactgtggtaagaattaaatgctttaaaaaaaaaaaaaaaaaa

SEQ ID NO: 474 - DNA, 1594 bp, Homo sapiens
atttatggatcattaatgcctctttagtagtttagagaaaacgtcaaaagaaatggccccagaataagcttcttgatttgtaaaattctatgtcattggctcaaatttgtatagtatctcaaaatataaatatatagacatctcagataatatatttgaaatagcaaattcctgttagaaaataatagtacttaactagatgagaataacaggtcgccattatttgaattgtctcctattcgtttttcatttgttgtgttactcatgttttacttatgagggatatatataacttccactgttttcagaattattgtatgcagtcagtatgagaatgcaatttaagtttccttgatgctttttcacacttctattactagaaataagaatacagtaatattggcaaagaaaattgaccagttcaataaaattttttagtaaatctgattgaaaataaacattgcttatggctttcttacatcaatattgttatgtcctagacaccttatctgaaattacggcttcaaaattctaattatgtgcaaatgtgtaaaatatcaatactttatgttcaagctggggcctcttcaggcgtcctgggctgagagagaaagatgctagctccgcaagccggagagggaacaccgccacattgttacacggacacaccgccacgtggacacatgaccagactcacatgtacagacacacggagacattaccacatggagacaccgtcacacagtcacacggacacactggcatagtcacatggacggacacacagacatatggagaaatcacatggacacaccaccacactatcacagggacacagacacacggagacatcaccacatggacacactgtcacactaccacagggacacgagacatcacactgtcacatggacacaccatcacacacatgaacacaccgacacactgccatatggacactggcacacacactgccacactgtcacatggacacacctccacaccatcacaccaccacacacactgcctgtggacacaaggacacacagacactgtcacacagatacacaaaacactgtcacacggagacatcaccatgcagatacaccaccactctggtgccgtctgaattaccctgctggggggacagcagtggcatactcatgcctaagtgactggctttcaccccagtagtgattgccctccatcaacactgcccaccccaggttggggctaccccagcccatctttacaaaacagggcaaggtgaactaatggagtgggtggaggagttggaagaaatcccagcgtcagtcaccgggatagaattcccaaggaaccctctttttggaggatggtttccatttctggaggcgatctgccgacagggtgaatgccttcttgcttgtcttctggggaatcagagagagtccgttttgtggtgggaagagtgtggctgtgtactttgaactcctgtaaattctctgactcatgtccacaaaaccaacagttttgtgaatgtgtctggaggcaagggaagggccactcaggatctatgttgaagggaagaggcctggggctggagtattcgctt

SEQ ID NO: 475 - DNA, 2414 bp, Homo sapiens
  unsure (33): n=A,T,C or G
cccaacacaatggctttataagaatgcttcacntgtgaaaaacaaatatcaaagtcttcttgtagattatttttaaggacaaatctttattccatgtttaatttatttagctttccctgtagctaatatttcatgctgaacacattttaaatgctgtaaatgtagataatgtaatttatgtatcattaatgcctctttagtagtttagagaaaacgtcaaaagaaatggccccagaataagcttcttgatttgtaaaattctatgtcattggctcaaatttgtatagtatctcaaaatataaatatatagacatctcagataatatatttgaaatagcaaattcctgttagaaaataatagtacttaactagatgagaataacaggtcgccattatttgaattgtctcctattcgtttttcatttgttgtgttactcatgttttacttatggggggatatatataacttccgctgttttcagaagtattgtatgcagtcagtatgagaatgcaatttaagtttccttgatgctttttcacacttctattactagaaataagaatacagtaatattggcaaagaaaattgaccagttcaataaaattttttagtaaatctgattgaaaataaacattgcttatggctttcttacatcaatattgttatgtcctagacaccttatctgaaattacggcttcaaaattctaattatgtgcaaatgtgtaaaatatcaatactttatgttcaagctggggcctcttcaggcgtcctgggctgagagagaaagatgctagctccgcaagccggggagggaacaccgccacattgttacatggacacaccgccacgtggacacatgaccagactcacatgtacagacacacggagacattaccacatggagacaccgtcacacagtcacacgagcacactggcatagtcacatggacggacacacagacatatggagaaatcacactgacacaccaccacactatcacagggacacagacacacggagacatcaccacatggacacactgtcacactaccacagggacacgagacatcacactgtcacatggacacaccatcacacacatgaacacaccgacacactgccatatggacactgccacacacactgccacactgtcacatggacacacctccataccatcacaccaccacacacactgccatgtggacacaaggacacacagacactgtcacacagatacacaaaacactgtcacacggagacatcaccatgcagatacaccaccacatggacatagcaccagacactctgccacacagatacaccaccacacagaaatgcggacacactgccacacagacaccaccacatcgttgccacactttcatgtgtcagctggcggtgtgggccccacgactctgggctctaatcgagaaattacttggacatatagtgaaggcaaaatttttttttattttctgggtaaccaagcgcgactctgtctcaaaaaaagaaaaaaaaagcaatatactgtgtaatcgttgacagcataattcactattatgtagatcggagagcagaggattctgaatgcatgaacatatcattaacatttcaatacattactcataattactgatgaactaaagagaaaccaagaaattatggtgatagttatattgacctggagaaatgtagacacaaaagaaccgtaagatgagaaatgtgttaacacagtctataagggcatgcaagaataaaaataggggagaaaacaggagagtttttcaagagctttctggtcatgtaagtcaacttgtatcggttaatttttaaaaggtttatttacatgcaataaactgcacatacttcaattgtacattttggtaattcttggcatttgtagctctataaaaccagcaacatattaaaatagcaaacatatccattacctttaccaccaaagttttcttgtgttttttctactcactttttcctgcctatccccccatctcttccacaggtaaccactgatccacttccagtcactatccatgagtttttatttccaaatacatgaaatcatatgaatttctggtttttcctgttggagcccaaggagcaagggcagaatgaggaacatgatgtttcttwccgacagttactcatgacgtctccatccaggactgaggggggcatccttctccatctaggactgggggcatccttctccatccagtattgggggtcatccttctccatccagtattgggggtcatcctcctccatccaggacctgaggggtgtccttttctgcgcttccttggatggcagtctttcccttcatgtttatagtracttaccattaaatcactgtgccgttttttcctaaaataaaaaaaaaaaaaaaaa

SEQ ID NO: 476 - DNA, 3434 bp, Homo sapiens
ctgtgctgcaaatggggccatatagaggaaaggagcagctggctctggagcatggtgtgcactccctttgggccttcagtccatgtctcatgggtcgtatgacactgcgggcttgttggttgccaagaggcagaccacaggtcatcttgaggaggactttatgttccagtccagaaagcagccagtggtaccacccaggggacttgtgcttctgtggcccaggccagacgtagaatttgacaaagtcaggacggtctcagtcagagcagcatgtcggtccccggggcctgtgcatgccgggcagggccaggctggcttaaggagcaagcagccacctctgttaggggtgtgcctggagcaggtggagcagccaccaacctcacgcactgaaagaagcagggatggccaggttccaacatcctgagtggctgccacctgatggctgatggagcagaggcctgaggaaaagcagatggcactgctttgtagtgctgttctttgtctctcttgatctttttcagttaatgtctgttttatcagagactaggattgcaaaccctgctcttttttgctttccatttgcttggtaaatattcctccatccctttattttaagcctatgtgtgtctttgcacatgagatgggtctcctgaatacaggacaacaatgggtctttactctttatccaacttgccagtctgtgtcttttaactggggcatttagcccatttacatttaagtttagtatttgttacatgtgaaatttatcctgtcatgatgttgctagctttttatttttcccattagtttgcagtttctttatagtgtcaatggtctttacaattcgatatgtttttgtagtggctggtactggtttttcctttctacgtttagtgtctccttcaggagctcttgtaacacaagaatgtggatttatttcttgtaaggtaaatatgtggatttattctgggactgtattctatggcctttaccccaagaatcattactttttaaaatgcaattcaaattagcataaaacatttacagcctatggaaaggcttgtggcattagaatccttatttataggattattttgtgtttttttgagatatggtctttgtcatcgaggcagaagtgccgtggtttgatcataattcaccacagccctgaactcttgagtccaagccatccttttgccttaatctcccaaccagttggatctacaagcataaggcatcatgcgtggctaattttttcacgttttttttttttttgtcgagattatggtatcactgtgttgctctggctgatctcaaatgtttgacctcaagggatctttctgccacagcctcctaaagtgctaggattatatgcatgatacaccatgcctattgtagagtattacattattttcaaagtcttattgtaagagccatttattgcctttggcctaaataactcaatataatatctctgaaacttttttttgacaaattttggggcgtgatgatgagagaagggggtttgaaactttctaataagagttaacttagagccatttaagaaaggaaaaaacacaaattatcagaaaaacaacagtaagatcaagtgcaaaagttctgtggcaaagatgatgagagtaaagaatatatgtttgtgactcatggtggcttttactttgttcttgaatttctgagtacgggttaacatttaaagaatctacattatagataacattttattgcaagtaaatgtatttcaaaatttgttattggttttgtatgagattattctcagcctacttcattatcaagctatattattttattaatgtagttcgatgatcttacagcaaagctgaaagctgtatcttcaaaatatgtctatttgactaaaaagttattcaacaggagttattatctataaaaaaatacaacaggaatataaaaaacttgaggataaaaagatgttggaaaaagtaatattaaatcttaaaaaacatatggaaactacacaatggtgaagacacattggtgaagtacaaaaatataaattggatctagaagaaagggcaatgcaggcaatagaaaaattagtagaaatccctttaaaggttagtttgtaaaatcaggtaagtttatttataatttgctttcatttatttcactgcaaattatattttggatatgtatatatattgtgcttcctctgcctgtcttacagcaatttgccttgcagagttctaggaaaaaggtggcatgtgtttttactttcaaaatatttaaatttccatcattataacaaaatcaatttttcagagtaatgattctcactgtggagtcatttgattattaagacccgttggcataagattacatcctctgactataaaaatcctggaagaaaacctaggaaatattcgtctggacattgcacttggcaatgaatttatgggcgctttggaatcctgcagatataataatgataattaaacaaaacactcagagaaactgccaaccctaggatgaagtatattgttactgtgctttgggattaaaataagtaactacagtttatagaacttttatactgatacacagacactaaaaagggaaagggtttagatgagaagctctgctatgcaatcaagaatctcagccactcatttctgtaggggctgcaggagctccctgtaaagagaggttatggagtctgtagcttcaggtaagatacttaaaacccttcagagtttctccattttttcccatagtttccccaaaaaggttatgacactttataagaatgcttcacttgtgaaaaacaaatatcaaagtcttcttgtagattatttttaaggacaaatctttattccatgtttaatttatttagctttccctgtagctaatatttcatgctgaacacattttaaatgctgtaaatgtagataatgtaatttatgtatcattaatgcctctttagtagtttagagaaaacgtcaaaagaaatggccccagaataagcttcttgatttgtaaaattctatgtcattggctcaaatttgtatagtatctcaaaatataaatatatagacatctcagataatatatttgaaatagcaaattcctgttagaaaataatagtacttaactagatgagaataacaggtcgccattatttgaattgtctcctattcgtttttcatttgttgtgttactcatgttttacttatggggggatatatataacttccgctgttttcagaagtattgtatgcagtcagtatgagaatgcaatttaagtttccttgatgctttttcacacttctattactagaaataagaatacagtaatattggcaaagaaaattgaccagttcaataaaattttttagtaaatctgattgaaaataaaaaaaaaaaaaaaaaaaaaaaaa

SEQ ID NO: 477 - protein, 140 aa, Homo sapiens
MDGHTDIWRNHMDTPPHYHRDTDTRRHHHMDTLSHYHRDTRHHTVTWTHHHTHEHTDTLPYGHWHTHCHTVTWTHLHTITPPHTLPVDTRTHRHCHTDTQNTVTRRHHHADTPPLWCRLNYPAGGTAVAYSCLSDWLSPQ

SEQ ID NO: 478 - protein, 143 aa, Homo sapiens
MYRHTETLPHGDTVTQSHGHTGIVTWTDTQTYGEITWTHHHTITGTQTHGDITTWTHCHTTTGTRDITLSHGHTITHMNTPTHCHMDTGTHTATLSHGHTSTPSHHHTHCLWTQGHTDTVTQIHKTLSHGDITMQIHHHSGAV

SEQ ID NO: 479 - protein, 222 aa, Homo sapiens
MYRHTETLPHGDTVTQSHEHTGIVTWTDTQTYGEITLTHHHTITGTQTHGDITTWTHCHTTTGTRDITLSHGHTITHMNTPTHCHMDTATHTATLSHGHTSIPSHHHTHCHVDTRTHRHCHTDTQNTVTRRHHHADTPPHGHSTRHSATQIHHHTEMRTHCHTDTTTSLPHFHVSAGGVGPTTLGSNREITWTYSEGKIFFYFLGNQARLCLKKRKKKQYTV

SEQ ID NO: 480 - protein, 144 aa, Homo sapiens [sequence omitted]

SEQ ID NO: 481 - protein, 167 aa, Homo sapiens
MHGPQVLARCSECACPALAATSAGVRLEGVDRPPTLPSQGSGWPCSHSLSGCHLMADGAKALGKADGPWPYLFVRRTDVPCPAASEVGGCAPSSWRALAEVTGCSLGPLGLAQHAQASVLLLCYKWSHIGETSSHLRSKVYAAFGGSSPCLKGLMSLWASWLSRGRP

SEQ ID NO: 482 - protein, 143 aa, Homo sapiens [sequence omitted]

SEQ ID NO: 483 - protein, 143 aa, Homo sapiens
METQRGNKQRAQEQGVCCLWGSSPCLGSYGTAGFLVAKRRTTGLLEEDFTFKCRKQPKLPSMRLSLLWPWRDLKFVPRQDKLTRSSVSVAGAYACRAGPGWLKEQPATSARVRLVQAEHPPPHPLEEVGMARFPQPECLPPYC

SEQ ID NO: 484 - protein, 30 aa, Homo Sapien
TAASDNFQLSQGGQGFAIPIGQAMAIAGQI

SEQ ID NO: 485 - DNA, 31 bp, Artificial Sequence
  Made in a lab
gggaagcttatcacctatgtgccgcctctgc

SEQ ID NO: 486 - DNA, 27 bp, Artificial Sequence
  Made in a lab
gcgaattctcacgctgagtatttggcc

SEQ ID NO: 487 - DNA, 36 bp, Artificial Sequence
  Made in a lab
cccgaattcttagctgcccatccgaacgccttcatc

SEQ ID NO: 488 - DNA, 33 bp, Artificial Sequence
  Made in a lab
gggaagcttcttccccggctgcaccagctgtgc

SEQ ID NO: 489 - protein, 19 aa, Artificial Sequence
  Made in a lab
MDRLVQRFGTRAVYLASVA

SEQ ID NO: 490 - protein, 20 aa, Artificial Sequence
  Made in a lab
YLASVAAFPVAAGATCLSHS

SEQ ID NO: 491 - protein, 20 aa, Artificial Sequence
  Made in a lab
TCLSHSVAVVTASAALTGFT

SEQ ID NO: 492 - protein, 20 aa, Artificial Sequence
  Made in a lab
ALTGFTFSALQILPYTLASL

SEQ ID NO: 493 - protein, 20 aa, Artificial Sequence
  Made in a lab
YTLASLYHREKQVFLPKYRG

SEQ ID NO: 494 - protein, 20 aa, Artificial Sequence
  Made in a lab
LPKYRGDTGGASSEDSLMIS

SEQ ID NO: 495 - protein, 20 aa, Artificial Sequence
  Made in a lab
DSLMTSFLPGPKPGAPFPNG

SEQ ID NO: 496 - protein, 21 aa, Artificial Sequence
  Made in a lab
APFPNGHVGAGGSGLLPPPPA

SEQ ID NO: 497 - protein, 20 aa, Artificial Sequence
  Made in a lab
LLPPPPALCGASACDVSVRV

SEQ ID NO: 498 - protein, 20 aa, Artificial Sequence
  Made in a lab
DVSVRVVVGEPTEARVVPGR

SEQ ID NO: 499 - protein, 20 aa, Artificial Sequence
  Made in a lab
RVVPGRGICLDLAILDSAFL

SEQ ID NO: 500 - protein, 20 aa, Artificial Sequence
  Made in a lab
LDSAFLLSQVAPSLFMGSIV

SEQ ID NO: 501 - protein, 20 aa, Artificial Sequence
  Made in a lab
FMGSIVQLSQSVTAYMVSAA

SEQ ID NO: 502 - DNA, 414 bp, Homo Sapien
  misc_feature (1)...(414): n = A,T,C or G
caccatggagacaggcctgcgctggcttttcctggtcgctgtgctcaaaggtgtccaatgtcagtcggtggaggagtccgggggtcgcctggtcacgcctgggacacctttgacantcacctgtagagtttttggaatngacctcagtagcaatgcaatgagctgggtccgccaggctccagggaaggggctggaatggatcggagccattgataattgtccacantacgcgacctgggcgaaaggccgattnatnatttccaaaacctngaccacggtggatttgaaaatgaccagtccgacaaccgaggacacggccacctatttttgtggcagaatgaatactggtaatagtggttggaagaatatttggggcccaggcaccctggtcaccgtntcctcagggcaacctaa

SEQ ID NO: 503 - DNA, 379 bp, Homo Sapiens
  misc_feature (1)...(379): n = A,T,C or G
atncgatggtgcttggtcaaaggtgtccagtgtcagtcggtggaggagtccgggggtcgcctggtcacgcctgggacacccctgacactcacctgcaccgtntctggattngacatcagtagctatggagtgagctgggtccgccaggctccagggaaggggctggnatacatcggatcattagtagtagtggtacattttacgcgagctgggcgaaaggccgattcaccatttccaaaacctngaccacggtggatttgaaaatcaccagtttgacaaccgaggacacggccacctatttntgtgccagaggggggtttaattataaagacatttggggcccaggcaccctggtcaccgtntccttagggcaacctaa

SEQ ID NO: 504 - protein, 19 aa, Artificial Sequence
  Made in a lab
GFTNYTDFEDSPYFKENSA

SEQ ID NO: 505 - protein, 20 aa, Artificial Sequence
  Made in a lab
KENSAFPPFCCNDNVTNTAN

SEQ ID NO: 506 - DNA, 407 bp, Homo Sapien
atggagacaggcctgcgctggcttctcctggtcgctgcgctcaaaggtgtccagtgtcagtcgctggaggagtccgggggtcgcctggtcacgcctgggacacccctgacactcacctgcaccgtctctggattctccctcagtagcaatgcaatgatctgggtccgccaggctccagggaaggggctggaatacatcggatacattagttatggtggtagcgcatactacgcgagctgggtgaaaggccgattcaccatctccaaaacctcgaccacggtggatctgagaatgaccagtctgacaaccgaggacacggccacctatttctgtgccagaaatagtgattttagtggtatgttgtggggcccaggcaccctggtcaccgtctcctcagggcaacctaa

SEQ ID NO: 507 - DNA, 422 bp, Homo Sapien
atggagacaggcctgcgctggcttctcctggtcgctgtgctcaaaggtgtccagtgtcagtcggtggaggagtccgggggtcgcctggtcacgcctgggacacccctgacactcacctgtacagtctctggattctccctcagcaactacgacctgaactgggtccgccaggctccagggaaggggctggaatggatcgggatcattaattatgttggtaggacggactacgcgaactgggcaaaaggccggttcaccatctccaaaacctcgaccaccgtggatctcaagatcgccagtccgacaaccgaggacacggccacctatttctgtgccagagggtggaagtgcgatgagtctggtccgtgcttgcgcatctggggcccaggcaccctggtcaccgtctccttagggcaacctaa

SEQ ID NO: 508 - DNA, 411 bp, Homo Sapiens
  misc_feature (1)...(411): n = A,T,C or G
atggagacaggcctcgctggcttctcctggtcgctgtgctcaaaggtgtccagtgtcagtcggtggaggagtccgggggtcgcctggtcacgcctgggacacccctgacactcacctgcacagtctctggaatcgacctcagtagctactgcatgagctgggtccgccaggctccagggaaggggctggaatggatcggaatcattggtactcctggtgacacatactacgcgaggtgggcgaaaggccgattcaccatctccaaaacctcgaccacggtgcatntgaaaatcnccagtccgacaaccgaggacacggccacctatttctgtgccagagatcttcgggatggtagtagtactggttattataaaatctggggcccaggcaccctggtcaccgtctccttgg

SEQ ID NO: 509 - protein, 15 aa, Artificial Sequence
  Made in a lab
LCKFTEWIEKTVQAS

SEQ ID NO: 510 - protein, 15 aa, Artificial Sequence
  Made in a lab
PEYNRPLLANDLMLI

SEQ ID NO: 511 - protein, 15 aa, Artificial Sequence
  Made in a lab
YHPSMFCAGGGQDQK

SEQ ID NO: 512 - protein, 15 aa, Artificial Sequence
  Made in a lab
DSGGPLICNGYLQGL

SEQ ID NO: 513 - protein, 15 aa, Artificial Sequence
  Made in a lab
APCGQVGVPBVYTNL

SEQ ID NO: 514 - protein, 15 aa, Artificial Sequence
  Made in a lab
LCKFTEWIEKTVQAS

SEQ ID NO: 515 - protein, 15 aa, Artificial Sequence
  Made in a lab
MVEASLSVRHPEYNR

SEQ ID NO: 516 - protein, 15 aa, Artificial Sequence
  Made in a lab
VSESDTIRSISIASQ

SEQ ID NO: 517 - protein, 15 aa, Artificial Sequence
  Made in a lab
EVCSKLYDPLYHPSM

SEQ ID NO: 518 - protein, 15 aa, Artificial Sequence
  Made in a lab
RAEPGTEARRHYDEG

SEQ ID NO: 519 - protein, 17 aa, Artificial Sequence
  Made in a lab
RAEPGTEARRNYDEGCG

SEQ ID NO: 520 - protein, 25 aa, Artificial Sequence
  Made in a lab
VGEGLYQGVPRAEPGTEARRHYDEG

SEQ ID NO: 521 - protein, 21 aa, Artificial Sequence
  Made in a lab
APFPNGHVGAGGSGLLPPPPA

SEQ ID NO: 522 - protein, 20 aa, Artificial Sequence
  Made in a lab
LLVVPAIKKDYGSQEDFTQV

SEQ ID NO: 523 - protein, 254 aa, Artificial Sequence
  Made in a lab
  VARIANT (1)...(254): Xaa = any amino acid
MATAGNPWGWFLGYLILGVAGSLVSGSCSQIINGEDCSPHSQPWQAALVMENELFCSGVLVHPQWVLSATHCFQNSYTIGLGLHSLEADQEPGSQMVEASLSVRHPEYNRPLLANDLMLIKLDESVSESDTIRSISIASQCPTAGNSCLVSGWGLLANGRMPTVLQCVNVSVVSEEVCSKLYDPLYHPSMFCAGGGQXQXDSCNGDSGGPLICNGYLQGLVSFGKAPCGQVGVPGVYTNLCKFTEWIEKTVQAS

SEQ ID NO: 524 - DNA, 765 bp, Homo sapien
atggccacagcaggaaatccctggggctggttcctggggtacctcatccttggtgtcgcaggatcgctcgtctctggtagctgcagccaaatcataaacggcgaggactgcagcccgcactcgcagccctggcaggcggcactggtcatggaaaacgaattgttctgctcgggcgtcctggtgcatccgcagtgggtgctgtcagccgcacactgtttccagaactcctacaccatcgggctgggcctgcacagtcttgaggccgaccaagagccagggagccagatggtggaggccagcctctccgtacggcacccagagtacaacagacccttgctcgctaacgacctcatgctcatcaagttggacgaatccgtgtccgagtctgacaccatccggagcatcagcattgcttcgcagtgccctaccgcggggaactcttgcctcgtttctggctggggtctgctggcgaacggcagaatgcctaccgtgctgcagtgcgtgaacgtgtcggtggtgtctgaggaggtctgcagtaagctctatgacccgctgtaccaccccagcatgttctgcgccggcggagggcaagaccagaaggactcctgcaacggtgactctggggggcccctgatctgcaacgggtacttgcagggccttgtgtctttcggaaaagccccgtgtggccaagttggcgtgccaggtgtctacaccaacctctgcaaattcactgagtggatagagaaaaccgtccaggccagttaa

SEQ ID NO: 525 - protein, 254 aa, Homo sapien
MATAGNPWGWFLGYLILGVAGSLVSGSCSQIINGEDCSPHSQPWQAALVMENELFCSGVLVHPQWVLSAAHCFQNSYTIGLGLHSLEADQEPGSQMVEASLSVRHPEYNRPLLANDLMLIKLDESVSESDTIRSISIASQCPTAGNSCLVSGWGLLANGRMPTVLQCVNVSVVSEEVCSKLYDPLYHPSMFCAGGGQDQKDSCNGDSGGPLICNGYLQGLVSFGKAPCGQVGVPGVYTNLCKFTEWIEKTVQAS

SEQ ID NO: 526 - DNA, 963 bp, Homo sapiens
atgagttcctgcaacttcacacatgccacctttgtgcttattggtatcccaggattagagaaagcccatttctgggttggcttccccctcctttccatgtatgtagtggcaatgtttggaaactgcatcgtggtcttcatcgtaaggacggaacgcagcctgcacgctccgatgtacctctttctctgcatgcttgcagccattgacctggccttatccacatccaccatgcctaagatccttgcccttttctggtttgattcccgagagattagctttgaggcctgtcttacccagatgttctttattcatgccctctcagccattgaatccaccatcctgctggccatggcctttgaccgttatgtggccatctgccacccactgcgccatgctgcagtgctcaacaatacagtaacagcccagattggcatcgtggctgtggtccgcggatccctcttttttttcccactgcctctgctgatcaagcggctggccttctgccactccaatgtcctctcgcactcctattgtgtccaccaggatgtaatgaagttggcctatgcagacactttgcccaatgtggtatatggtcttactgccattctgctggtcatgggcgtggacgtaatgttcatctccttgtcctattttctgataatacgaacggttctgcaactgccttccaagtcagagcgggccaaggcctttggaacctgtgtgtcacacattggtgtggtactcgccttctatgtgccacttattggcctctcagttgtacaccgctttggaaacagccttcatcccattgtgcgtgttgtcatgggtgacatctacctgctgctgcctcctgtcatcaatcccatcatctatggtgccaaaaccaaacagatcagaacacgggtgctggctatgttcaagatcagctgtgacaaggacttgcaggctgtgggaggcaagtga

SEQ ID NO: 527 - protein, 320 aa, Homo sapiens
MSSCNFTHATFVLIGIPGLEKAHFWVGFPLLSMYVVAMFGNCIVVFIVRTERSLHAPMYLFLCMLAAIDLALSTSTMPKILALFWFDSREISFEACLTQMFFIHALSAIESTILLAMAFDRYVAICHPLRHAAVLNNTVTAQIGIVAVVRGSLFFFPLPLLIKRLAFCHSNVLSHSYCVHQDVMKLAYADTLPNVVYGLTAILLVMGVDVMFISLSYFLIIRTVLQLPSKSERAKAFGTCVSHIGVVLAFYVPLIGLSVVHRFGNSLHPIVRVVMGDIYLLLPPVINPIIYGAKTKQIRTRVLAMFKISCDKDLQAVGGK

SEQ ID NO: 528 - DNA, 20 bp, Homo Sapien
actatggtccagaggctgtg

SEQ ID NO: 529 - DNA, 20 bp, Homo Sapien
atcacctatgtgccgcctct

SEQ ID NO: 530 - DNA, 1852 bp, Homo sapiens
ggcacgagaattaaaaccctcagcaaaacaggcatagaagggacataccttaaagtaataaaaaccacctatgacaagcccacagccaacataatactaaatggggaaaagttagaagcatttcctctgagaactgcaacaataaatacaaggatgctggattttgtcaaatgccttttctgtgtctgttgagatgcttatgtgactttgcttttaattctgtttatgtgattatcacatttattgacttgcctgtgttagaccggaagagctggggtgtttctcaggagccaccgtgtgctgcggcagcttcgggataacttgaggctgcatcactggggaagaaacacaytcctgtccgtggcgctgatggctgaggacagagcttcagtgtggcttctctgcgactggcttcttcggggagttcttccttcatagttcatccatatggctccagaggaaaattatattattttgttatggatgaagagtattacgttgtgcagatatactgcagtgtcttcatctcttgatgtgtgattgggtaggttccaccatgttgccgcagatgacatgatttcagtacctgtgtctggctgaaaagtgtttgtttgtgaatggatattgtggtttctggatctcatcctctgtgggtggacagctttctccaccttgctggaagtgacctgctgtccagaagtttgatggctgaggagtataccatcgtgcatgcatctttcatttcctgcatttcttcctccctggatggacagggggagcggcaagagcaacgtgggcacttctggagaccacaacgactcctctgtgaagacgcttgggagcaagaggtgcaagtggtgctgccactgcttcccctgctgcagggggagcggcaagagcaacgtggtcgcttggggagactacgatgacagcgccttcatggatcccaggtaccacgtccatggagaagatctggacaagctccacagagctgcctggtggggtaaagtccccagaaaggatctcatcgtcatgctcagggacacggatgtgaacaagagggacaagcaaaagaggactgctctacatctggcctctgccaatgggaattcagaagtagtaaaactcgtgctggacagacgatgtcaacttaatgtccttgacaacaaaaagaggacagctctgacaaaggccgtacaatgccaggaagatgaatgtgcgttaatgttgctggaacatggcactgatccaaatattccagatgagtatggaaataccactctacactatgctgtctacaatgaagataaattaatggccaaagcactgctcttatacggtgctgatatcgaatcaaaaaacaagcatggcctcacaccactgctacttggtatacatgagcaaaaacagcaagtggtgaaatttttaatcaagaaaaaagcgaatttaaatgcgctggatagatatggaagaactgctctcatacttgctgtatgttgtggatcagcaagtatagtcagccctctacttgagcaaaatgttgatgtatcttctcaagatctggaaagacggccagagagtatgctgtttctagtcatcatcatgtaatttgccagttactttctgactacaaagaaaaacagatgttaaaaatctcttctgaaaacagcaatccagaacaagacttaaagctgacatcagaggaagagtcacaaaggcttaaaggaagtgaaaacagccagccagagctagaagatttatggctattgaagaagaatgaagaacacggaagtactcatgtgggattcccagaaaacctgactaacggtgccgctgctggcaatggtgatga

SEQ ID NO: 531 - DNA, 879 bp, Homo sapiens
atgcatctttcatttcctgcatttcttcctccctggatggacagggggagcggcaagagcaacgtgggcacttctggagaccacaacgactcctctgtgaagacgcttgggagcaagaggtgcaagtggtgctgccactgcttcccctgctgcagggggagcggcaagagcaacgtggtcgcttggggagactacgatgacagcgccttcatggatcccaggtaccacgtccatggagaagatctggacaagctccacagagctgcctggtggggtaaagtccccagaaaggatctcatcgtcatgctcagggacacggatgtgaacaagagggacaagcaaaagaggactgctctacatctggcctctgccaatgggaattcagaagtagtaaaactcgtgctggacagacgatgtcaacttaatgtccttgacaacaaaaagaggacagctctgacaaaggccgtacaatgccaggaagatgaatgtgcgttaatgttgctggaacatggcactgatccaaatattccagatgagtatggaaataccactctacactatgctgtctacaatgaagataaattaatggccaaagcactgctcttatacggtgctgatatcgaatcaaaaaacaagcatggcctcacaccactgctacttggtatacatgagcaaaaacagcaagtggtgaaatttttaatcaagaaaaaagcgaatttaaatgcgctggatagatatggaagaactgctctcatacttgctgtatgttgtggatcagcaagtatagtcagccctctacttgagcaaaatgttgatgtatcttctcaagatctggaaagacggccagagagtatgctgtttctagtcatcatcatgtaa

SEQ ID NO: 532 - protein, 292 aa, Homo sapiens
MHLSFPAFLPPWMDRGSGKSNVGTSGDHNDSSVKTLGSKRCKWCCHCFPCCRGSGKSNVVAWGDYDDSAFMDPRYHVHGEDLDKLHRAAWWGKVPRKDLIVMLRDTDVNKRDKQKRTALHLASANGNSEVVKLVLDRRCQLNVLDNKKRTALTKAVQCQEDECALMLLEHGTDPNIPDEYGNTTLHYAVYNEDKLMAKALLLYGADIESKNKHGLTPLLLGIHEQKQQVVKFLIKKKANLNALDRYGRTALILAVCCGSASIVSPLLEQNVDVSSQDLERRPESMLFLVIIM

SEQ ID NO: 533 - DNA, 801 bp, Homo sapiens
atgtacaagcttcagtgcaacaactgtgctacaaatggagccacagagaggaaacaagcagcaggctcaggagcagggtatgcgctgccttcggctctccaatccatgcctcagggctcctatgccactgcacgattcttggttgccaagaggccaaccacaggccatcttgagaaggagtttatgttccactgcagaaagcagccaggatcaccatccaggggacttggtcttctgtggccctggccagacatagaatttgtgccaaggcaggacaagctcactcagagcagcgtgttagtacctcaaatctgtgcgtgccagacaaggccaaactggctcaatgagcaaccagccacctctgcaggggtgcgtctggaggaggtggaccagccaccaaccttacccagtcaaggaagtggatggccatgttcccacagcctgagtggctgccacctgatggctgatatagcaaaggccttaggaaaagcagatggcccttggccctacctttttgttagaagaactgatgttccatgtcctgcagcgagtgaggttggtggctgtgcccccagctcctggcacaccctcgcagaggtgactggttgctctttgagccctcttagccttgcccagcatgcacaagcctcagtgctactactgtgctacaaatggagccatataggggaaacgagcagccatctcaggagcaaggtgtatgctgcctttgggggctccagtccttgcctcaagggtcttatgtcactgtgggcttcttggttgccaagaggcagaccatag

SEQ ID NO: 534 - protein, 266 aa, Homo sapiens [sequence omitted]

SEQ ID NO: 535 - DNA, 6082 bp, Homo sapiens
cctccactattacagcttataggaaattacaatccactttacaggcctcaaaggttcattctggccgagcggacaggcgtggcggccggagccccagcatccctgcttgaggtccaggagcggagcccgcggccactgccgcctgatcagcgcgaccccggcccgcgcccgccccgcccggcaagatgctgcccgtgtaccaggaggtgaagcccaacccgctgcaggacgcgaacctctgctcacgcgtgttcttctggtggctcaatcccttgtttaaaattggccataaacggagattagaggaagatgatatgtattcagtgctgccagaagaccgctcacagcaccttggagaggagttgcaagggttctgggataaagaagttttaagagctgagaatgacgcacagaagccttctttaacaagagcaatcataaagtgttactggaaatcttatttagttttgggaatttttacgttaattgaggaaagtgccaaagtaatccagcccatatttttgggaaaaattattaattattttgaaaattatgatcccatggattctgtggctttgaacacagcgtacgcctatgccacggtgctgactttttgcacgctcattttggctatactgcatcacttatatttttatcacgttcagtgtgctgggatgaggttacgagtagccatgtgccatatgatttatcggaaggcacttcgtcttagtaacatggccatggggaagacaaccacaggccagatagtcaatctgctgtccaatgatgtgaacaagtttgatcaggtgacagtgttcttacacttcctgtgggcaggaccactgcaggcgatcgcagtgactgccctactctggatggagataggaatatcgtgccttgctgggatggcagttctaatcattctcctgcccttgcaaagctgttttgggaagttgttctcatcactgaggagtaaaactgcaactttcacggatgccaggatcaggaccatgaatgaagttataactggtataaggataataaaaatgtacgcctgggaaaagtcattttcaaatcttattaccaatttgagaaagaaggagatttccaagattctgagaagttcctgcctcagggggatgaatttggcttcgtttttcagtgcaagcaaaatcatcgtgtttgtgaccttcaccacctacgtgctcctcggcagtgtgatcacagccagccgcgtgttcgtggcagtgacgctgtatggggctgtgcggctgacggttaccctcttcttcccctcagccattgagagggtgtcagaggcaatcgtcagcatccgaagaatccagacctttttgctacttgatgagatatcacagcgcaaccgtcagctgccgtcagatggtaaaaagatggtgcatgtgcaggattttactgctttttgggataaggcatcagagaccccaactctacaaggcctttcctttactgtcagacctggcgaattgttagctgtggtcggccccgtgggagcagggaagtcatcactgttaagtgccgtgctcggggaattggccccaagtcacgggctggtcagcgtgcatggaagaattgcctatgtgtctcagcagccctgggtgttctcgggaactctgaggagtaatattttatttgggaagaaatacgaaaaggaacgatatgaaaaagtcataaaggcttgtgctctgaaaaaggatttacagctgttggaggatggtgatctgactgtgataggagatcggggaaccacgctgagtggagggcagaaagcacgggtaaaccttgcaagagcagtgtatcaagatgctgacatctatctcctggacgatcctctcagtgcagtagatgcggaagttagcagacacttgttcgaactgtgtatttgtcaaattttgcatgagaagatcacaattttagtgactcatcagttgcagtacctcaaagctgcaagtcagattctgatattgaaagatggtaaaatggtgcagaaggggacttacactgagttcctaaaatctggtatagattttggctcccttttaaagaaggataatgaggaaagtgaacaacctccagttccaggaactcccacactaaggaatcgtaccttctcagagtcttcggtttggtctcaacaatcttctagaccctccttgaaagatggtgctctggagagccaagatacagagaatgtcccagttacactatcagaggagaaccgttctgaaggaaaagttggttttcaggcctataagaattacttcagagctggtgctcactggattgtcttcattttccttattctcctaaacactgcagctcaggttgcctatgtgcttcaagattggtggctttcatactgggcaaacaaacaaagtatgctaaatgtcactgtaaatggaggaggaaatgtaaccgagaagctagatcttaactggtacttaggaatttattcaggtttaactgtagctaccgttctttttggcatagcaagatctctattggtattctacgtccttgttaactcttcacaaactttgcacaacaaaatgtttgagtcaattctgaaagctccggtattattctttgatagaaatccaataggaagaattttaaatcgtttctccaaagacattggacacttggatgatttgctgccgctgacgtttttagatttcatccagacattgctacaagtggttggtgtggtctctgtggctgtggccgtgattccttggatcgcaatacccttggttccccttggaatcattttcatttttcttcggcgatattttttggaaacgtcaagagatgtgaagcgcctggaatctacaactcggagtccagtgttttcccacttgtcatcttctctccaggggctctggaccatccgggcatacaaagcagaagagaggtgtcaggaactgtttgatgcacaccaggatttacattcagaggcttggttcttgtttttgacaacgtcccgctggttcgccgtccgtctggatgccatctgtgccatgtttgtcatcatcgttgcctttgggtccctgattctggcaaaaactctggatgccgggcaggttggtttggcactgtcctatgccctcacgctcatggggatgtttcagtggtgtgttcgacaaagtgctgaagttgagaatatgatgatctcagtagaaagggtcattgaatacacagaccttgaaaaagaagcaccttgggaatatcagaaacgcccaccaccagcctggccccatgaaggagtgataatctttgacaatgtgaacttcatgtacagtccaggtgggcctctggtactgaagcatctgacagcactcattaaatcacaagaaaaggttggcattgtgggaagaaccggagctggaaaaagttccctcatctcagccctttttagattgtcagaacccgaaggtaaaatttggattgataagatcttgacaactgaaattggacttcacgatttaaggaagaaaatgtcaatcatacctcaggaacctgttttgttcactggaacaatgaggaaaaacctggatccctttaatgagcacacggatgaggaactgtggaatgccttacaagaggtacaacttaaagaaaccattgaagatcttcctggtaaaatggatactgaattagcagaatcaggatccaattttagtgttggacaaagacaactggtgtgccttgccagggcaattctcaggaaaaatcagatattgattattgatgaagcgacggcaaatgtggatccaagaactgatgagttaatacaaaaaaaatccgggagaaatttgcccactgcaccgtgctaaccattgcacacagattgaacaccattattgacagcgacaagataatggttttagattcaggaagactgaaagaatatgatgagccgtatgttttgctgcaaaataaagagagcctattttacaagatggtgcaacaactgggcaaggcagaagccgctgccctcactgaaacagcaaaacaggtatacttcaaaagaaattatccacatattggtcacactgaccacatggttacaaacacttccaatggacagccctcgaccttaactattttcgagacagcactgtgaatccaaccaaaatgtcaagtccgttccgaaggcatttgccactagtttttggactatgtaaaccacattgtacttttttttactttggcaacaaatatttatacatacaagatgctagttcatttgaatatttctcccaacttatccaaggatctccagctctaacaaaatggtttatttttatttaaatgtcaatagttgttttttaaaatccaaatcagaggtgcaggccaccagttaaatgccgtctatcaggttttgtgccttaagagactacagagtcaaagctcatttttaaaggagtaggacagagttgtcacaggtttttgttgttgtttttattgcccccaaaattacatgttaatttccatttatatcagggattctatttacttgaagactgtgaagttgccattttgtctcattgttttctttgacataactaggatccattatttcccctgaaggcttcttgttagaaaatagtacagttacaaccaataggaacaacaaaaagaaaaagtttgtgacattgtagtagggagtgtgtaccccttactccccatcaaaaaaaaaaatggatacatggttaaaggatagaagggcaatattttatcatatgttctaaaagagaaggaagagaaaatactactttctcaaaatggaagcccttaaaggtgctttgatactgaaggacacaaatgtgaccgtccatcctcctttagagttgcatgacttggacacggtaactgttgcagttttagactcagcattgtgacacttcccaagaaggccaaacctctaaccgacattcctgaaatacgtggcattattcttttttggatttctcatttatggaaggctaaccctctgttgactgtaagccttttggtttgggctgtattgaaatcctttctaaattgcatgaataggctctgctaacgtgatgagacaaactgaaaattattgcaagcattgactataattatgcagtacgttctcaggatgcatccaggggttcattttcatgagcctgtccaggttagtttactcctgaccactaatagcattgtcatttgggctttctgttgaatgaatcaacaaaccacaatacttcctgggaccttttgtactttatttgaactatgagtctttaatttttcctgatgatggtggctgtaatatgttgagttcagtttactaaaggttttactattatggtttgaagtggagtctcatgacctctcagaataaggtgtcacctccctgaaattgcatatatgtatatagacatgcacacgtgtgcatttgtttgtatacatatatttgtccttcgtatagcaagttttttgctcatcagcagagagcaacagatgttttattgagtgaagccttaaaaagcacacaccacacacagctaactgccaaaatacattgaccgtagtagctgttcaactcctagtacttagaaatacacgtatggttaatgttcagtccaacaaaccacacacagtaaatgtttattaatagtcatggttcgtattttaggtgactgaaattgcaacagtgatcataatgaggtttgttaaaatgatagctatattcaaaatgtctatatgtttatttggacttttgaggttaaagacagtcatataaacgtcctgtttctgttttaatgttatcatagaattttttaatgaaactaaattcaattgaaataaatgatagttttcatctccaaaaaaaaaaaaaaaaagggcggccgctcgagtctagagggcccgtttaaacccgctgatcagcctcgactgtgccttctagttgccagccatctgttgtttgcccctcccccgtgccttccttgaccctggaaggtgccactcccactgtcctttcctaataaaatgaggaaattgcatc

SEQ ID NO: 536 - DNA, 6140 bp, Homo sapiens
  misc_feature (1)...(6140): n=A,T,C or G
cagtggcgcagtctcagctcactgcagcctccacctcctgtgttcaagcagtcctcctgcctcagccaccagactagcaggtctcccccgcctctttcttggaaggacacttgccattggatttaggacccacttggataatccaggatgatgtcttcactccaacatcctcagtttaattccatgtgcaaatacccttttcccaaataacattcaattctttaccaggaaaggtggctcaatcccttgtttaaaattggccataaacggagattagaggaagatgatatgtattcagtgctgccagaagaccgctcacagcaccttggagaggagttgcaagggttctgggataaagaagttttaagagctgagaatgacgcacagaagccttctttaacaagagcaatcataaagtgttactggaaatcttatttagttttgggaatttttacgttaattgaggaaagtgccaaagtaatccagcccatatttttgggaaaaattattaattattttgaaaattatgatcccatggattctgtggctttgaacacagcgtacgcctatgccacggtgctgactttttgcacgctcattttggctatactgcatcacttatatttttatcacgttcagtgtgctgggatgaggttacgagtagccatgtgccatatgatttatcggaaggcacttcgtcttagtaacatggccatggggaagacaaccacaggccagatagtcaatctgctgtccaatgatgtgaacaagtttgatcaggtgacagtgttcttacacttcctgtgggcaggaccactgcaggcgatcgcagtgactgccctactctggatggagataggaatatcgtgccttgctgggatggcagttctaatcattctcctgcccttgcaaagctgttttgggaagttgttctcatcactgaggagtaaaactgcaactttcacggatgccaggatcaggaccatgaatgaagttataactggtataaggataataaaaatgtacgcctgggaaaagtcattttcaaatcttattaccaatttgagaaagaaggagatttccaagattctgagaagttcctgcctcagggggatgaatttggcttcgtttttcagtgcaagcaaaatcatcgtgtttgtgaccttcaccacctacgtgctcctcggcagtgtgatcacagccagccgcgtgttcgtggcagtgacgctgtatggggctgtgcggctgacggttaccctcttcttcccctcagccattgagagggtgtcagaggcaatcgtcagcatccgaagaatccagacctttttgctacttgatgagatatcacagcgcaaccgtcagctgccgtcagatggtaaaaagatggtgcatgtgcaggattttactgctttttgggataaggcatcagagaccccaactctacaaggcctttcctttactgtcagacctggcgaattgttagctgtggtcggccccgtgggagcagggaagtcatcactgttaagtgccgtgctcggggaattggccccaagtcacgggctggtcagcgtgcatggaagaattgcctatgtgtctcagcagccctgggtgttctcgggaactctgaggagtaatattttatttgggaagaaatacgaaaaggaacgatatgaaaaagtcataaaggcttgtgctctgaaaaaggatttacagctgttggaggatggtgatctgactgtgataggagatcggggaaccacgctgagtggagggcagaaagcacgggtaaaccttgcaagagcagtgtatcaagatgctgacatctatctcctggacgatcctctcagtgcagtagatgcggaagttagcagacacttgttcgaactgtgtatttgtcaaattttgcatgagaagatcacaattttagtgactcatcagttgcagtacctcaaagctgcaagtcagattctgatattgaaagatggtaaaatggtgcagaaggggacttacactgagttcctaaaatctggtatagattttggctcccttttaaagaaggataatgaggaaagtgaacaacctccagttccaggaactcccacactaaggaatcgtaccttctcagagtcttcggtttggtctcaacaatcttctagaccctccttgaaagatggtgctctggagagccaagatacagagaatgtcccagttacactatcagaggagaaccgttctgaaggaaaagttggttttcaggcctataagaattacttcagagctggtgctcactggattgtcttcattttccttattctcctaaacactgcagctcaggttgcctatgtgcttcaagattggtggctttcatactgggcaaacaaacaaagtatgctaaatgtcactgtaaatggaggaggaaatgtaaccgagaagctagatcttaactggtacttaggaatttattcaggtttaactgtagctaccgttctttttggcatagcaagatctctattggtattctacgtccttgttaactcttcacaaactttgcacaacaaaatgtttgagtcaattctgaaagctccggtattattctttgatagaaatccaataggaagaattttaaatcgtttctccaaagacattggacacttggatgatttgctgccgctgacgtttttagatttcatccagacattgctacaagtggttggtgtggtctctgtggctgtggccgtgattccttggatcgcaatacccttggttccccttggaatcattttcatttttcttcggcgatattttttggaaacgtcaagagatgtgaagcgcctggaatctacaactcggagtccagtgttttcccacttgtcatcttctctccaggggctctggaccatccgggcatacaaagcagaagagaggtgtcaggaactgtttgatgcacaccaggatttacattcagaggcttggttcttgtttttgacaacgtcccgctggttcgccgtccgtctggatgccatctgtgccatgtttgtcatcatcgttgcctttgggtccctgattctggcaaaaactctggatgccgggcaggttggtttggcactgtcctatgccctcacgctcatggggatgtttcagtggtgtgttcgacaaagtgctgaagttgagaatatgatgatctcagtagaaagggtcattgaatacacagaccttgaaaaagaagcaccttgggaatatcagaaacgcccaccaccagcctggccccatgaaggagtgataatctttgacaatgtgaacttcatgtacagtccaggtgggcctctggtactgaagcatctgacagcactcattaaatcacaagaaaaggttggcattgtgggaagaaccggagctggaaaaagttccctcatctcagccctttttagattgtcagaacccgaaggtaaaatttggattgataagatcttgacaactgaaattggacttcacgatttaaggaagaaaatgtcaatcatacctcaggaacctgttttgttcactggaacaatgaggaaaaacctggatccctttaatgagcacacggatgaggaactgtggaatgccttacaagaggtacaacttaaagaaaccattgaagatcttcctggtaaaatggatactgaattagcagaatcaggatccaattttagtgttggacaaagacaactggtgtgccttgccagggcaattctcaggaaaaatcagatattgattattgatgaagcgacggcaaatgtggatccaagaactgatgagttaatacaaaaaaaaatccgggagaaatttgcccactgcaccgtgctaaccattgcacacagattgaacaccattattgacagcgacaagataatggttttagattcaggaagactgaaagaatatgatgagccgtatgttttgctgcaaaataaagagagcctattttacaagatggtgcaacaactgggcaaggcagaagccgctgccctcactgaaacagcaaaacagagatggggtttcaccatgttggccaggctggtctcaaactcctgacctcaagtgatccacctgccttggcctcccaaactgctgagattacaggtgtgagccaccacgcccagcctgagtatacttcaaaagaaattatccacatattggtcacactgaccacatggttacaaacacttccaatggacagccctcgaccttaactattttcgagacagcactgtgaatccaaccaaaatgtcaagtccgttccgaaggcatttgccactagtttttggactatgtaaaccacattgtacttttttttactttggcaacaaatatttatacatacaagatgctagttcatttgaatatttctcccaacttatccaaggatctccagctctaacaaaatggtttatttttatttaaatgtcaatagtkgktttttaaaatccaaatcagaggtgcaggccaccagttaaatgccgtctatcaggttttgtgccttaagagactacagnagtcagaagctcatttttaaaggagtaggacagagttgtcacaggtttttgttggtgtttktattgcccccaaaattacatgttaatttccatttatatcaggggattctatttacttgaagactgtgaagttgccattttgtctcattgttttctttgacatamctaggatccattatttcccctgaaggcttcttgkagaaaatagtacagttacaaccaataggaactamcaaaaagaaaaagtttgtgacattgtagtagggagtgtgtaccccttactccccatcaaaaaaaaaaatggatacatggttaaaggatagaagggcaatattttatcatatgttctaaaagagaaggaagagaaaatactactttctcaaaatggaagcccttaaaggtgctttgatactgaaggacacaaatgtgaccgtccatcctcctttagagttgcatgacttggacacggtaactgttgcagttttagactcagcattgtgacacttcccaagaaggccaaacctctaaccgacattcctgaaatacgtggcattattcttttttggatttctcatttaggaaggctaaccctctgttgamtgtamkccttttggtttgggctgtattgaaatcctttctaaattgcatgaataggctctgctaaccgtgatgagacaaactgaaaattattgcaagcattgactataattatgcagtacgttctcaggatgcatccaggggttcattttcatgagcctgtccaggttagtttactcctgaccactaatagcattgtcatttgggctttctgttgaatgaatcaacaaaccacaatacttcctgggaccttttgtactttatttgaactatgagtctttaatttttcctgatgatggtggctgtaatatgttgagttcagtttactaaaggttttactattatggtttgaagggagtctcatgacctctcagaaaaggtgcacctccctgaaattgcatatatgtatatagacatgcacacgtgtgcatttgtttgtatacatatatttgtccttcgtatagcaagttttttgctcatcagcagagagcaacagatgttttattgagtgaagccttaaaaagcacacaccacacacagctaactgccaaaatacattgaccgtagtagctgttcaactcctagtacttagaaatacacgtatggttaatgttcagtccaacaaaccacacacagtaaatgtttattaatagtcatggttcgtattttaggtgactgaaattgcaacagtgatcataatgaggtttgttaaaatgatagctatattcaaaatgtctatatgtttatttggacttttgaggttaaagacagtcatataaacgtcctgtttctgttttaatgttatcatagaattttttaatgaaactaaattcaattgaaataaatgatagttttcatctccaaaaaaaaaaaaaaagggcggcccgctcgagtctagagggcccggtttaaacccgctgatcagcctcgactgtgccttctagttgccagccatctgttgtttggccctcccccgtgccttccttgaccctggaaggggccactccc

SEQ ID NO: 537 - protein, 1228 aa, Homo sapiens
MLPVYQEVKPNPLQDANLCSRVFFWWLNPLFKIGHKRRLEEDDMYSVLPEDRSQHLGEELQGFWDKEVLRAENDAQKPSLTRAIIKCYWKSYLVLGIFTLIEESAKVIQPIFLGKIINYFENYDPMDSVALNTAYAYATVLTFCTLILAILHHLYFYHVQCAGMRLRVAMCHMIYRKALRLSNMAMGKTTTGQIVNLLSNDVNKFDQVTVFLHFLWAGPLQAIAVTALLWMEIGISCLAGMAVLIILLPLQSCFGKLFSSLRSKTATFTDARIRTMNEVITGIRIIKMYAWEKSFSNLITNLRKKEISKILRSSCLRGMNLASFFSASKIIVFVTFTTYVLLGSVITASRVFVAVTLYGAVRLTVTLFFPSAIERVSEAIVSIRRIQTFLLLDEISQRNRQLPSDGKKMVHVQDFTAFWDKASETPTLQGLSFTVRPGELLAVVGPVGAGKSSLLSAVLGELAPSHGLVSVHGRIAYVSQQPWVFSGTLRSNILFGKKYEKERYEKVIKACALKKDLQLLEDGDLTVIGDRGTTLSGGQKARVNLARAVYQDADIYLLDDPLSAVDAEVSRHLFELCICQILHEKITILVTHQLQYLKAASQILILKDGKMVQKGTYTEFLKSGIDFGSLLKKDNEESEQPPVPGTPTLRNRTFSESSVWSQQSSRPSLKDGALESQDTENVPVTLSEENRSEGKVGFQAYKNYFRAGAHWIVFIFLILLNTAAQVAYVLQDWWLSYWANKQSMLNVTVNGGGNVTEKLDLNWYLGIYSGLTVATVLFGIARSLLVFYVLVNSSQTLHNKMFESILKAPVLFFDRNPIGRILNRFSKDIGHLDDLLPLTFLDFIQTLLQVVGVVSVAVAVIPWIAIPLVPLGIIFIFLRRYFLETSRDVKRLESTTRSPVFSHLSSSLQGLWTIRAYKAEERCQELFDAHQDLHSEAWFLFLTTSRWFAVRLDAICAMFVIIVAFGSLILAKTLDAGQVGLALSYALTLMGMFQWCVRQSAEVENMMISVERVIEYTDLEKEAPWEYQKRPPPAWPHEGVIIFDNVNFMYSPGGPLVLKHLTALIKSQEKVGIVGRTGAGKSSLISALFRLSEPEGKIWIDKILTTEIGLHDLRKKMSIIPQEPVLFTGTMRKNLDPFNEHTDEELWNALQEVQLKETIEDLPGKMDTELAESGSNFSVGQRQLVCLARAILRKNQILIIDEATANVDPRTDELIQKKSGRNLPTAPC

SEQ ID NO: 538 - protein, 1261 aa, Homo sapiens
MYSVLPEDRSQHLGEELQGFWDKEVLRAENDAQKPSLTRAIIKCYWKSYLVLGIFTLIEESAKVIQPIFLGKIINYFENYDPMDSVALNTAYAYATVLTFCTLILAILHHLYFYHVQCAGMRLRVAMCHMIYRKALRLSNMAMGKTTTGQIVNLLSNDVNKFDQVTVFLHFLWAGPLQAIAVTALLWMEIGISCLAGMAVLIILLPLQSCFGKLFSSLRSKTATFTDARIRTMNEVITGIRIIKMYAWEKSFSNLITNLRKKEISKILRSSCLRGMNLASFFSASKIIVFVTFTTYVLLGSVITASRVFVAVTLYGAVRLTVTLFFPSAIERVSEAIVSIRRIQTFLLLDEISQRNRQLPSDGKKMVHVQDFTAFWDKASETPTLQGLSFTVRPGELLAVVGPVGAGKSSLLSAVLGELAPSHGLVSVHGRIAYVSQQPWVFSGTLRSNILFGKKYEKERYEKVIKACALKKDLQLLEDGDLTVIGDRGTTLSGGQKARVNLARAVYQDADIYLLDDPLSAVDAEVSRHLFELCICQILHEKITILVTHQLQYLKAASQILILKDGKMVQKGTYTEFLKSGIDFGSLLKKDNEESEQPPVPGTPTLRNRTFSESSVWSQQSSRPSLKDGALESQDTENVPVTLSEENRSEGKVGFQAYKNYFRAGAHWIVFIFLILLNTAAQVAYVLQDWWLSYWANKQSMLNVTVNGGGNVTEKLDLNWYLGIYSGLTVATVLFGIARSLLVFYVLVNSSQTLHNKMFESILKAPVLFFDRNPIGRILNRFSKDIGHLDDLLPLTFLDFIQTLLQVVGVVSVAVAVIPWIAIPLVPLGIIFIFLRRYFLETSRDVKRLESTTRSPVFSHLSSSLQGLWTIRAYKAEERCQELFDAHQDLHSEAWFLFLTTSRWFAVRLDAICAMFVIIVAFGSLILAKTLDAGQVGLALSYALTLMGMFQWCVRQSAEVENMMISVERVIEYTDLEKEAPWEYQKRPPPAWPHEGVIIFDNVNFMYSPGGPLVLKHLTALIKSQEKVGIVGRTGAGKSSLISALFRLSEPEGKIWIDKILTTEIGLHDLRKKMSIIPQEPVLFTGTMRKNLDPFNEHTDEELWNALQEVQLKETIEDLPGKMDTELAESGSNFSVGQRQLVCLARAILRKNQILIIDEATANVDPRTDELIQKKIREKFAHCTVLTIAHRLNTIIDSDKIMVLDSGRLKEYDEPYVLLQNKESLFYKMVQQLGKAEAAALTETAKQRWGFTMLARLVSNS

SEQ ID NO: 539 - protein, 10 aa, Artificial Sequence
  Made in a lab
CLSHSVAVVT

SEQ ID NO: 540 - protein, 9 aa, Artificial Sequence
  Made in a lab
AVVTASAAL

SEQ ID NO: 541 - protein, 14 aa, Homo sapiens
LAGLLCPDPRPLEL

SEQ ID NO: 542 - protein, 15 aa, Homo sapiens
TQVVFDKSDLAKYSA

SEQ ID NO: 543 - protein, 12 aa, Homo sapiens
FMGSIVQLSQSV

SEQ ID NO: 544 - protein, 18 aa, Homo sapiens
TYVPPLLLEVGVEEKFMT

SEQ ID NO: 545 - protein, 18 aa, Homo sapiens
MDRLVQRFGTRAVYLASV

SEQ ID NO: 546 - protein, 29 aa, Homo sapiens
FVGEGLYQGVPRAEPGTEARRHYDEGVRM

SEQ ID NO: 547 - protein, 58 aa, Homo sapiens
VAEEAALGPTEPAEGLSAPSLSPHCCPCRARLAFRNLGALLPRLHQLCCRMPRTLRRL

SEQ ID NO: 548 - protein, 18 aa, Homo sapiens
IDWDTSALAPYLGTQEEC

SEQ ID NO: 549 - protein, 18 aa, Homo sapiens
LEALLSDLFRDPDHCRQA

SEQ ID NO: 550 - protein, 14 aa, Homo sapiens
SDHWRGRYGRRRPF

SEQ ID NO: 551 - protein, 11 aa, Artificial Sequence
  Made in a lab
FDKSDLAKYSA

SEQ ID NO: 552 - DNA, 2577 bp, Homo sapiens
agcatatgtaacatgacctgtgcttcagtgttcttttgtgatcaaaaattccttacttttagttttttatctatggtagaaccacccagagcaggggtcctcaactcccaggccacagactcataccagtccacggactattatgaaccacaccacacaggaggaggtgagcactaggcaagccaaggaagcttcacctgtacttacagccacacgccatggctcatattacagcctgaactctgcctccactcagatcagtgataacattagaaactcattggagcacgaaccctgttgtgaactgcctatccgaaggatctaggttgtgtgcttcgtatgagaatctaatgccagatgatctatcattgtctcactttgcccccagataagaccatctagttgcagaaaaataagctcagagcttccactgattctacattatggatatgtgccgccgaagcaagcacaaagccctacttttacacatgcctagtgatgcttcatggacaaggcttggctctgttgagtccaactaacctacctgagattctgagatttctcttcaatggcttcctgtgagctagagtttgaaaatatcttaaaatcttgagctagagatggaagtagcttggacgattttcattatcatgtaaatcgggtcactcaaggggccaaccacagctgggagccactgctcaggggaaggttcatatgggactttctactgcccaaggttctatacaggatataaaggtgcctcacagtatagatctggtagcaaagaagaagaaacaaacactgatctctttctgccacccctctgaccctttggaactcctctgaccctttagaacaagcctacctaatatctgctagagaaaagaccaacaacggcctcaaaggatctcttaccatgaaggtctcagctaattcttggctaagatgtgggttccacattaggttctgaatatggggggaagggtcaatttgctcattttgtgtgtggataaagtcaggatgcccaggggccagagcagggggctgctgctttgggaacaatggctgagcatataaccataggtatgggaacaaaaaacatcaaagtcactgtatcaattgccatgaagactcgagggacctgaatctaccgattcatcttaaggcagcaggaccagtttgagtggcaacaatgcagcagcagaatcaatggaaacaacagaatgattgcaatgtccttttttttctcctccttctgacttgataaaagggaccgtcttccttggatttagtgaacccctttggttcctgaaaaattcaaggagtatctaggacatagtccccagaagacagtacaagactttctgataaactggacatttcaagrcccaaataactaatcagaaaaatcaaagatgtgatactattttttatcccatgcataggtgctacacttggatcaaatgaacaatgttgggatctytatggataaaggtcttaaaagtcctgagataaagaatcctgcacccactggtacttctaacttgtcttgttttttgtctgwtttctggctgatgcaggggactaactcactgccacgcgaaaactacctgaactgaactatgacatctcacctgatatgtaagatgtaactgttataattattttaaacctcaatttagcattaactagccttttaatgtaaacacttacacattatgaygactagaaacagcatactctctggccgtctgtccagatagatcttgagaagatacatcaatgttttgctcaagtagaaggctgactatacttgccgatccacaacatacagcaagtatgagagcagttctaaaatgacagagataggaacagtaataaagttattktaaaagctaatttgatatactttaccaatttaacatcttgcctgtccgtgcagaatcaaacatttacatgcactaaaagacataagcatcttcagtgctcaagtgttcatctttgtaaaataccaccaaggttaaaaggaagggacaaaaaaaaaaaaccctcttatctcagtggggtattgcatagcagaagctactaatttgaagtcctttgatggacaagaaacaatattagggccacttatctgaaatgaacaaagatttaagtgaagatttcatcacagcttccctagactgatatgctgtaatagaaaatcagctagggggtaaaataaataagagctctctgcatgctgaaagcaagtaagattaataataatggtaagaatagtagtcacaggagtttcagttaatgatgccaataagcatgtgctaggcactgaattaaatgccacatatatctttcttatgcgcagcaaactttgaaggatatattctcctacttttcatatatgacaacatatttggtggtaaataacgttcccaaggtcacacacctagcaagtaagaaagttaggaattaaacccagtattgtgtgaatctaaagcctaacttttttctctttatcacccacctacggcttgtcttcattaaaggaaaagtgtatccacttaaaaaaaaaaaaaa

SEQ ID NO: 553 - protein, 58 aa, Homo sapiens
SICNMTCASVFFCDQKFLTFSFLSMVEPPRAGVLNSQATDSYQSTDYYEPHHTGGGEH

SEQ ID NO: 554 - protein, 58 aa, Homo sapiens; identical to SEQ ID NO: 553

SEQ ID NO: 555 - protein, 58 aa, Homo sapiens; identical to SEQ ID NO: 553

SEQ ID NO: 556 - protein, 58 aa, Homo sapiens; identical to SEQ ID NO: 553

SEQ ID NO: 557 - protein, 58 aa, Homo sapiens; identical to SEQ ID NO: 553

SEQ ID NO: 558 - protein, 58 aa, Homo sapiens; identical to SEQ ID NO: 553

SEQ ID NO: 559 - protein, 58 aa, Homo sapiens; identical to SEQ ID NO: 553

SEQ ID NO: 560 - protein, 58 aa, Homo sapiens; identical to SEQ ID NO: 553

SEQ ID NO: 561 - protein, 58 aa, Homo sapiens; identical to SEQ ID NO: 553

SEQ ID NO: 562 - protein, 58 aa, Homo sapiens; identical to SEQ ID NO: 553

SEQ ID NO: 563 - protein, 58 aa, Homo sapiens; identical to SEQ ID NO: 553

SEQ ID NO: 564 - protein, 58 aa, Homo sapiens; identical to SEQ ID NO: 553

SEQ ID NO: 565 - protein, 58 aa, Homo sapiens; identical to SEQ ID NO: 553

SEQ ID NO: 566 - protein, 58 aa, Homo sapiens; identical to SEQ ID NO: 553

SEQ ID NO: 567 - protein, 58 aa, Homo sapiens; identical to SEQ ID NO: 553

SEQ ID NO: 568 - protein, 58 aa, Homo sapiens; identical to SEQ ID NO: 553

SEQ ID NO: 569 - DNA, 4809 bp, Homo sapiens
gcatccagagtggtggactggttacaggctatgaacctacactgatgcggcaccaccacccagagtccacrggttatgttggttcacatttactcttgctgtggtatggtctataggtttggacagatgtccgataatcctttttacattttggcatccttgggtagctcgtcttgtaggaatggacttgcttcaaagtggaggcaggcagatccttcagacgggtatatggagccctgttttcagttgcttttctaattctctcttatcgtttacctcaaaatcttcctgaggtctcgcttccttttaaaatccttgtctactttgcagcatcactctgacactcccattgattcctcagcacctactgactacacggttaggagtgcaagggtagaattcatgttttattcatctttgggtctgtagcacccagcaaagtgctcagtaaatgcgcagtaattgatttgacctctgaacaaatacacactgtactaagaatctacacaccgaaagacaaaaacaagacaaatttgagtgctacaggtgtcacgcttggcatcacacatgtgcctgtgtattcctctaggtggttaccaggagctctgccactgcatgtccactagtgacgggttcgctccaccaccccagctgggtagccgctgctctcacataaggggtccaattaaaattgccaggaataaattcccccggactttgacttctcaagagctaagaaggtttgctgagtattctggcatgatgtttggtgatcaaacaactgctggccaaaaatgatgagtatttccccctcttgctgaagatgtgctccatacaatagtccatcacattcatcattcatcagtctggaagtgtgcagaacaacatgtaatagataatatgattggctgcacacttccagactgatgaatgatgaatgtgatggactattgtatggagcacatcttcagcaagagggggaaatactcatcattttatctattacatgttgttctggtttttttttttttccaatgtccagcctaaactataaagtactttgagaacgcacagtgagccataagcttgccaataaagagtcctctgtggtatggaactggcttatttcatacacaatctgcaaacaatgagggcactattggaaacatactgtgctgcacagagcatttacaccgcttatctttaatcttccccagcaatccttgctttgtgcgcatttatgatccttgctctcagaagtccacatacttttccccaaccgtaacaaattatttaactcatctaatgtatgtatgtccgcgcagtctgaaaacagtaattgtccttgggaagaagtgagtttaagagagctctagggcactcatcacaactccagccctgccctccatgtggtagcagctctttggactggggctaagtgcttattcttgtgcttcattcctggtaagctcaatttctttaccttaggataactttgctggaaaagggctcagattcagccgaccattgtggcctctgtggctgtcacagcttgtccctgacatgctatgatgttgggtccccttctcatccccttgggatttcttctgctggcccacagccagaacaactaggccttttactccaccatccctttgttttcttttgtttcgttggtaaaaatcaatccttctaccatccatgcatagcaatttctaaaaactgaatttcaagagcagtatctgaagaaacaaacatgatttggtccttttagtaaacagaataaattttaataaatcaactttgaaatagttgtaagagttaagaaaaagcacaaaactgagatcatcagagcagcttggcctcaaaggacaggcagcaggattctacagggtttgagccttcctaagtgaagctgtttcctgcaggctccctgctccaagctcctagctaacagccccttctcccacgattggcaacaaagagcaaaaataactttgtacttgatgctgagtcagtgtaaaaagccataaaaaattccctctaaatgtcaaaatgtttgcctcctttgaggcttctctcctcctactgggtctggataaattagcactgggcttatattgagtcacagatctgggccctgccacagagagcttcctcctagtgtgtgatgctttttctccaaactattgatacaaaatgcactggaatagaaatcaacagaaactggtcaaaggtgtggcatacacattctcatgtagatgtaaagctgtgcttagaattcctttgtggagtctggtttggtcttggttttcttggtgtttgattcatttttttacgtaaattacaaaaaccctccacatttcttcatggattgtattagtccatgttctccagagaagcagaacgagttggatgtatgttttggaagagattatgaggaaccggctcatgtgatgaaggaggttgagaggtcctgtgctctgccatctgcaagctgaagacctggaaagctgagggtgtggctccagtctgagtctgaaggcccaagaaccaggggaaccaacggtgtagattccaggttgaaggcaggagaagatggatgtcccagctcagcaggcaggcaggaagcaaatggggtaaattcctccttcctccaccttttgttccattcaggccttcaacagattggatgagcgcccccccacccccacactagggagggccatctgctttactgagtcggctgagtcaagtgccagcctcatcccaaaacactctccagacacacgcagaaatgtttcatctgggcaccctgtggccagtcatgctgacacacagaactaaccatgacatggattcttcttaaagcagtgataggagcgaacagaaacattttcataattttcaattatttttaatgaaaactatatctgatggaattgtttaaacctagtctggccacacattatttcctgggaccgcccctccttcaatcccttggacactgatgactttatgcccagattacactggaggcctgtgctgattttctaacacatacctgcaactgagctggcaaaaagaaaactaggcaagtatgacagatacatgatgcacaggctaagtgcaaaggaaagaaaaacaccaactgcagggatgagggactcacccctttagaagtttctacttgagcagctagaagactacaatgccactcatcaaaacagtgactcagggggagtatttgggataaaggaggaatctgatgttggaggtcaaatttgaagtgtctttaagacctacaggtaacgagacagctggacaaacacatggaactcaggacaaaggctctaaggacagcacagcagctgacatcctgtgtgacagccttgaaagcagcaggcccgccgctcacattttggaagggaaaatgggtacaatgttgtctgccactttggggccttcttgggtcacatgcattttacatttatgcagttgatatatttatgtttcctgggtcttttatacattagacaccatgattctcaatcctttgttattttgtattacaaaaagctgaattattatttcaaatatgggcaaattagagccttccatattgccaaggtgtatcaaccacactgataycaygatctctcttttgaattagttttccagttcacacctaccatttatttcatgattggtttcagacttgttcctcctggaaacactccctaacaagcacccttgcaggaatgaagacacaccacacacatctaccccattactgcatgtactcaagagtcagcttttatatgatctctcccaagtgctcctataatggggatctttcactcaccctaaagtgaggacaaaatacttgaaagcatgagcccagtgcctgtaggtgtgcaattaacctcagaccaaggaagtgccgaacgcatctggcttttagcaaggcacctgacaaagtccttcaggatgtttttgtacatgagctagagaaatgtacctggagaacagcttctactgccagatgatcttactcaaaagatgcagattaagcaaaatatcaacccaaagggtggtccctgatggcccaccagcccctgtgcctggctcgtttcctatgtttcctagatttggtttcagacttgctcctcctgcagacactccctaaccagcatccttgcagaaaactggtgaactagaaaaggcctgtgtgggtcacgtggccacccaacaccacagcagtgtctaaggtatgcgtgggagcctgcacagcaggagcggggtcttctggagacccgcatgagatgcaaagggcagtggacaaggagccaagggaggtggctctagtcacgctggtatggtgccagcttgaggatgctgggcaagtcccgagccgtctgccttcctagtaccacagttaccactgtctgttacctcgcgagttcaagtgcttcacgtgagacagctacgagacaggcccctggaaactggaaaatgcyaagtaaatgtcatgcacaattgttgttcacattttatctcaatcacttttaccaaatcaggctaaaccctgggtattcataacgtcttgggctgtacaaattgttccttgaaatgactcagagacattttctgaattggcttccatcagccaagcatttcttcagaactggaaaaatgctttaaatttggctttgtcatgattattaaaacactctgtacattttttattattgaaattaacacattgcctactttttaaaaattggaaaaagaaaaaaaaaaaaaaaa

SEQ ID NO: 570 - DNA, 951 bp, Homo sapiens
aaaattgaatattgagataccattctttagtgttaccttttttacccacatgtgtttctgaaaatattggaattttattcatcttaaaaattggacccggccttatttaccatctttaatccattttagtactatgggtgagtacatggaattgaagtctggcttaaatcttcagaaagttatatatctattttattttatttttttgagacagagtctcgctgtgtcacccaggctggagtgcggtgccacaatcttggctcactgcaacctctgagtcccaggttcaagcgatactcatgcctcggcctcctgagtagctgggactacaggcgtgcaccaccacatctggctaatctttttttgtatttttagtagagacggggtttcactgtggtctccatctcctgacctcgtgatccgcctgcctcccaaagtgctgggattacaggcatgagccaccgcacacagctgggactgggtaatttataaagaaaagaggtttaatgactcacagttccgcatggctggagaggcctcaggaaacttacaatcatggtggaaggcgaaggggaagcaaggcacgtcttacatggtggcaggagagaacgagtgaggggggagactgccacaaactttttttttttgagacaagagtctggccctgttgcccaggctggagtgcagtggcatgatctcagctcactgcaacctctgcctcacaggttcaagcaattctcatgcctcagcctcccgcatagctgggaccacaggtatgcaccaccacacctagctaatttttgtagttttagtagagatggggtctcactatgttgctcaggctggtctaaaactcctgggctccagcaatccgcctgccttggcctcccaaagtgctggggttacaggcataagccaccacatccagcctgccacatacttttaaactat

SEQ ID NO: 571 - DNA, 819 bp, Homo sapiens
cagcttaaaaatggtttcttgaaatcagtgattagcattcactcaccagtacccctactaaggggtaggcactggtttgtactcctgggaatacaggagtacaccagaatttatttctgcttattgcttttgttgcaaatgccgtggcttcatctgaggaattctagaattcagagggtgtagccctccactctgctgtcttgctatctgctctcattgcatccgtttaacctgcattctgaaagatgtttctcaggtttttccttgacgattttcttcttttctgattctgacaatgttttaaatcattgtactgtggttatcatttctctgcatttattttacccatcttcctttgtaacttgtcctattgtcttttaatttctgcctgttctttatggctttcaacttcataaataacatgttttctcaaatctctttgtgaattccagagagggccaggcacggtggctcacatctgtaatcccagcactttggggaggctgagacgggtggatcacttgaggtcaggagtttgagaccagcctggccaacatggtgaaatcccgtttcactaaaaatacaaaaattacccaggcatggtggcgggcgcctgtaatcccaggtactcgggaggctgagggaggagaatcgcttgaacctgggaggctgagggaggagaatcgcttgaacccgggaggcagaggttgcagtgaaccgagatcatgttgctgcactccagcctggtcaacagagcaagactctgcctcaaaaacaaacaaataaacaaacaaacaaacaaaacagagagattttgct

SEQ ID NO: 572 - DNA, 203 bp, Homo sapiens
tatagaatactcaagctatgcatcaagcttggtaccgagctcggatccactatttacggccgccagtgtgctggaattcgcccttagctcggatccactagtccagtgtggtggaattccattgtgttgggcccaacacaatggagccaccacatccagcctgccacatacttttaaactatcaggtctcatgagaactcatg

SEQ ID NO: 573 - protein, 132 aa, Homo sapiens
MVEGEGEARHVLHGGRRERVRGETATNFFFLRQESGPVAQAGVQWHDLSSLQPLPHRFKQFSCLSLPHSWDHRYAPPHLANFCSFSRDGVSLCCSGWSKTPGLQQSACLGLPKCWGYRHKPPHPACHILLNY

SEQ ID NO: 574 - protein, 62 aa, Homo sapiens
MTHSSAWLERPQETYNHGGRRRGSKARLTWWQERTSEGGDCHKLFFFETRVWPCCPGWSAVA

SEQ ID NO: 575 - protein, 76 aa, Homo sapiens
MVKSRFTKNTKITQAWWRAPVIPGTREAEGGESLEPGRLREENRLNPGGRGCSEPRSCCCTPAWSTEQDSASKTNK

SEQ ID NO: 576 - protein, 68 aa, Homo sapiens
  unsure (42): Xaa = Any Amino Acid
MLGKSRAVCLPSTTVTTVCYLASSSASRETATRQAPGNWKMXSKCHAQLLFTFYLNHFYQIRLNPGYS

SEQ ID NO: 577 - protein, 57 aa, Homo sapiens
MYLENSFYCQMILLKRCRLSKISTQRVVPDGPPAPVPGSFPMFPRFGFRLAPPADTP

SEQ ID NO: 578 - protein, 51 aa, Homo sapiens
MQLIYLCFLGLLYIRHHDSQSFVILYYKKLNYYFKYGQIRAFHIAKVYQPH

SEQ ID NO: 579 - protein, 56 aa, Homo sapiens
MHFTFMQLIYLCFLGLLYIRHHDSQSFVILYYKKLNYYFKYGQIRAFHIAKVYQPH

SEQ ID NO: 580 - protein, 67 aa, Homo sapiens
MELRTKALRTAQQLTSCVTALKAAGPPLTFWKGKWVQCCLPLWGLLGSHAFYIYAVDIFMFPGSFIH

SEQ ID NO: 581 - protein, 77 aa, Homo sapiens [sequence omitted]

SEQ ID NO: 582 - protein, 51 aa, Homo sapiens
MLFLQTIDTKCTGIEINRNWSKVWHTHSHVDVKLCLEFLCGVWFGLGFLGV

SEQ ID NO: 583 - protein, 60 aa, Homo sapiens [sequence omitted]

SEQ ID NO: 584 - protein, 76 aa, Homo sapiens
MCLCIPLGGYQELCHCMSTSDGFAPPPQLGSRCSHIRGPIKIARNKFPRTLTSQELRRFAEYSGMMFGDQTTAGQK

SEQ ID NO: 585 - protein, 50 aa, Homo sapiens
MVYRFGQMSDNPFYILASLGSSSCRNGLASKWRQADPSDGYMEPCFQLLF

SEQ ID NO: 586 - protein, 60 aa, Homo sapiens
MLVHIYSCCGMVYRFGQMSDNPFYILASLGSSSCRNGLASKWRQADPSDGYMEPCFQLLF

SEQ ID NO: 587 - DNA, 1408 bp, Homo sapiens
ctggacactttgcgagggcttttgctggctgctgctgctgcccgtcatgctactcatcgtagcccgcccggtgaagctcgctgctttccctacctccttaagtgactgccaaacgcccaccggctggaattgctctggttatgatgacagagaaaatgatctcttcctctgtgacaccaacacctgtaaatttgatggggaatgtttaagaattggagacactgtgacttgcgtctgtcagttcaagtgcaacaatgactatgtgcctgtgtgtggctccaatggggagagctaccagaatgagtgttacctgcgacaggctgcatgcaaacagcagagtgagatacttgtggtgtcagaaggatcatgtgccacagatgcaggatcaggatctggagatggagtccatgaaggctctggagaaactagtcaaaaggagacatccacctgtgatatttgccagtttggtgcagaatgtgacgaagatgccgaggatgtctggtgtgtgtgtaatattgactgttctcaaaccaacttcaatcccctctgcgcttctgatgggaaatcttatgataatgcatgccaaatcaaagaagcatcgtgtcagaaacaggagaaaattgaagtcatgtctttgggtcgatgtcaagataacacaactacaactactaagtctgaagatgggcattatgcaagaacagattatgcagagaatgctaacaaattagaagaaagtgccagagaacaccacataccttgtccggaacattacaatggcttctgcatgcatgggaagtgtgagcattctatcaatatgcaggagccatcttgcaggtgtgatgctggttatactggacaacactgtgaaaaaaaggactacagtgttctatacgttgttcccggtcctgtacgatttcagtatgtcttaatcgcagctgtgattggaacaattcagattgctgtcatctgtgtggtggtcctctgcatcacaaggaaatgccccagaagcaacagaattcacagacagaagcaaaatacagggcactacagttcagacaatacaacaagagcgtccacgaggttaatctaaagggagcatgtttcacagtggctggactaccgagagcttggactacacaatacagtattatagacaaaagaataagacaagagatctacacatgttgccttgcatttgtggtaatctacaccaatgaaaacatgtactacagctatatttgattatgtatggatatatttgaaatagtatacattgtcttgatgttttttctgtaatgtaaataaactatttatatcacacaatawagttttttctttcccatgtatttgttatatataataaatactcagtgatgagaaaaaaaaaaaaaaaaaaaaaarwmgaccc

SEQ ID NO: 588 - protein, 81 aa, Homo sapiens [sequence omitted]

SEQ ID NO: 589 - protein, 157 aa, Homo sapiens
MTMCLCVAPMGRATRMSVTCDRLHANSRVRYLWCQKDHVPQMQDQDLEMESMKALEKLVKRRHPPVIFASLVQNVTKMPRMSGVCVILTVLKPTSIPSALLMGNLMIMHAKSKKHRVRNRRKLKSCLWVDVKITQLQLLSLKMGIMQEQIMQRMLTN

SEQ ID NO: 590 - protein, 347 aa, Homo sapiens
MLLIVARPVKLAAFPTSLSDCQTPTGWNCSGYDDRENDLFLCDTNTCKFDGECLRIGDTVTCVCQFKCNNDYVPVCGSNGESYQNECYLRQAACKQQSEILVVSEGSCATDAGSGSGDGVHEGSGETSQKETSTCDICQFGAECDEDAEDVWCVCNIDCSQTNFNPLCASDGKSYDNACQIKEASCQKQEKIEVMSLGRCQDNTTTTTKSEDGHYARTDYAENANKLEESAREHHIPCPEHYNGFCMHGKCEHSINMQEPSCRCDAGYTGQHCEKKDYSVLYVVPGPVRFQYVLIAAVIGTIQIAVICVVVLCITRKCPRSNRIHRQKQNTGHYSSDNTTRASTRLI

SEQ ID NO: 591 - DNA, 565 bp, Homo sapien
actaaagcaaatgaacaagctgacttgctagtatcatctgcattcattgaagcacaagaacttcatgccttgactcatgtaaatgcaataggattaaaaaataaatttgatatcacatggaaacagacaaaaaatattgtacaacattgcacccagtgtcagattctacacctggccactcaggaagcaagagttaatcccagaggtctatgtcctaatgtgttatggcaaatggatgtcatgcacgtaccttcatttggaaaattgtcatttgtccatgtgacagttgatacttattcacatttcatatgggcaacctgccagacaggagaaagtacttcccatgttaaaagacatttattatcttgttttcctgtcatgggagttccagaaaaagttaaaacagacaatgggccaggttactgtagtaaagcatttcaaaaattcttaaatcagtggaaaattacacatacaataggaattctctataattcccaaggacaggccataattgaaggaactaatagaacactcaaagctcaattggttaaacaaaaaaaaaaaa

SEQ ID NO: 592 - protein, 188 aa, Homo sapien
TKANEQADLLVSSAFIEAQELHALTHVNAIGLKNKFDITWKQTKNIVQHCTQCQILHLATQEARVNPRGLCPNVLWQMDVMHVPSFGKLSFVHVTVDTYSHFIWATCQTGESTSHVKRHLLSCFPVMGVPEKVKTDNGPGYCSKAFQKFLNQWKITHTIGILYNSQGQAIIEGTNRTLKAQLVKQKKK

SEQ ID NO: 593 - DNA, 271 bp, Homo sapien
  misc_feature (1)...(271): n = A,T,C or G
actttatgttcnagtgcanaaanccncctggattgccaccntactctcagggctgtganttgtgcncccanagcaacctgggcacgcggggacaggggggccnacaattgagggagcggtgtccctagctggggtctatacatgncngggnaagggcngctgagtnccatnagcaaagganctagnatntgcgggggtgcggcctgggcctaccctttnaagcatccntngatccactccangaanccnggggtagncaggtttnccaaca

SEQ ID NO: 594 - DNA, 376 bp, Homo sapien
  misc_feature (1)...(376): n = A,T,C or G
cctttgggggnggggggaacctttaccattgtncccctttatttcatttggttngggttcgcgccctcnngggccaacaaagttatcgtnnttgaagagaanatttttttggnttngncccgattaagcgncaaatgtgtagcaaaangccgtgccacttgtggcgtagctncgtcgggtcgattcgacgacaaggcgtngcgcgntancgttagtctcnaatngacccngtggcatgagcccacganggnttcgtgtcgtcacatggnctctagacataacgcncnccnttttttncagagggggntgccgcccttagggaggnaggggtggggacactagccaanccanantctnaccccattgaagaaaaggn

SEQ ID NO: 595 - DNA, 242 bp, Homo sapien
  misc_feature (1)...(242): n = A,T,C or G
agnctgctgntcgtnccctntatgtggcttcatnntgaggacaanagtngcactgaggcttgngnatgccaggcaaggncaagctggctcaaaaagcatccacccacctctgnaangggtatgccangagcangtgcaccagtcccaactangagncccnggcatgntacatcttcttccacccctnaaantttgngctacaangnccatttttctttttctcttaagggncncntggcttc

SEQ ID NO: 596 - DNA, 535 bp, Homo sapien
  misc_feature (1)...(535): n = A,T,C or G
accagttggatactgctaaanagatatttatgcagcctcatatgttaagtcgtatattttgaaagctttttaaattttttctttaagaagattttagatgcttatcactgagtaccagagggatgtaggctgatgcccttatcaacaaagtcagggactgtggcacacaaggattgactactgcagacacggccacaatgctacctctagagggcctgaatccccctgccctctctggtggggagaagggctggcagagccattagcatgggctccggccaatcctggccactttgacactcctggtgctgacccagggtcctggaggaagggatgaggtgggcagtagagatgctcagggcagtggcccctttccatccacactggaactatttcagtattttaccaccaattcagccattcccttgtgcgctggctgaacatcagccctgctccaggtctcagtttcccctttgtaaagggaaagctctggattcagggagtgatgaagaggtcatcatggtcttgagaattc

SEQ ID NO: 597 - DNA, 257 bp, Homo sapien
  misc_feature (1)...(257): n = A,T,C or G
tttcnatacccaaaantaccccatattangaccanacatttgtctnggaaaaattaccattntntaacntttgggccacctgagannaaatgggtgtaatncatgataagatggancagnattnctcttaagatnngatnagaccccgtttttcacggaacatatccaagnacccaataggnaacaagccacgggnggagtcacaaacatatattctttactctcataatccgtnncacanaactnttgnacttgac

SEQ ID NO: 598 - DNA, 222 bp, Homo sapien
  misc_feature (1)...(222): n = A,T,C or G
nntggntaccgtcnaaacttnncttggtacccgagctcggatccactagtccagtgtggtggaattccattgtgttgggctataagctgtaatagtggagncgtgctnggttcattgcannagnccctccgcanncacncttgnnacaacctgtgagnaggcnataaattattcacataatcatcactgcatgaanctgactcaaacgcatccacntacacc

SEQ ID NO: 599 - DNA, 238 bp, Homo sapien
  misc_feature (1)...(238): n = A,T,C or G
gcatgacatcancgatgtntttggnnacctganattngctaaaactngngnatgccgggnatgnaggtttggtantgatctatgcactcacatctcatggggacgtttcatgtggagtgntcgacaangttgctgnancngagaagtgatgatctcagttgaaagggtcatgtgaatacacnttacacttgaaaaagaagcacattgggaatatcacgaaacgnccaccaacatcctg

SEQ ID NO: 600 - DNA, 232 bp, Homo sapien
  misc_feature (1)...(232): n = A,T,C or G
cgaactatttagactacctaggaaaattattttagtatcagaagaatatcaggggtgtagtactcatcagagctaaatgagagcgctttaaaaatgttagtttgtcttccgccatttctacagaaagctgcaatttcaggttttcaacctaataggtgatatttaanaaaaaaaaaaagcaatcgcaaatagccccactgcttttacaaatcattttttccccaacacaatg

SEQ ID NO: 601 - DNA, 547 bp, Homo sapien
  misc_feature (1)...(547): n = A,T,C or G
cattgtgttggggaaaaaatgatttgtataagcagtggggctatttgcgattgctttttttttttcttaaatatcacctattaggttgaaaacctgaaattgcagctttctgtagaaatggcggaagacaaactaacatttttaaagcgctctcatttagctctgatgagtactacacccctnatattcttctgatactaaaataattttcctagtgtagtctaaacttttttaaaaagacatgtaatccgcggagttagtaactcaaaacgagtgcatctnggaagtatcgcagccgttnctggatnaaattcccagcttgctngcttgctnagccggggggcggtnaaaaaaacatctgcagcccnggggnaaaaaccttcgcattgttcttacgtgtttacgttattttatttccctnnagcaaggcnggganttggggactcgaaatggtacagttgggctggggatcgcccttgttacataaaagncgtccagaagagggacggttacaggcnggganctccaaaggtcagtccctgccatt

SEQ ID NO: 602 - DNA, 826 bp, Homo sapien
  misc_feature (1)...(826): n = A,T,C or G
cggggggnnttacgtctctctggacgcttttattgtaccagggcgatcccagcccaactgtaccattcgagtccctactcctgccttgctctagggaaataaaataacgtaaacacgtaagaacaatgcgaaagcgttttcttccctaggctgcagattgtcttcttcaccgcccctgcttagctagctagctagctgggaatttaatccagaaacggcttgcgatacctcctagatgcactcgttttgagttacaaactccgcggattacatgtctttttaaaaaagtttagactacactagggaaaattattttagtatcagaagaatatcagggggtgtagtactcatcagagctnaatgagagcgctttaaaaatgttagtttgtcttccgccatttctacagaaagctgcaatttcaggttttcancctaataggtgatatntaagaaaaaaaaaacaatcgcanatagcccactgcttttacaaatcatttttctcttctaggtatagcctgtcaggtggcctaatgtatttttgacatctctaggaattttaatagaccagaaatgggtgccagagatatgcctgcactaatcttaagtggggatttatgtatttctcaancaagtgattaaagcaaaactaggcacgaatgaaatcaagatctttaggccagaaatcatgaananttttanaattattttangaatctgtggcttctcttcttaaaatngaaaaaaaaattgtttaaacccanaaggtctgaatacccaagcnccctgaacnanagaacaangccggagcaccccctcccaaatcccc

SEQ ID NO: 603 - DNA, 817 bp, Homo sapien
  misc_feature (1)...(817): n = A,T,C or G
nnangacttttgtggtnttatacaattnttttttctatttctatgaagagaaagccacagagtcctaaaataattctaaaactcatcatgactttcttgcctaaaagatcttgatttcaatcgtgcctagttttgctttaatcacttgcttgagaaatacataaatccccacttaagattagtgcaggcatatctctggcacccatttctggttctattaaaattcctagagatgtcaaaaattacattaggccacctgacaggctatacctagaagagaaaaaatgatttgtaaaagcagtggggctatttgcgattgctttttttttttcttaaatatcacctattaggttgaaaacctgaaattgcagctttctgtagaaatggcggaagacaaactaacatttttaaagcgctctcatttagctctgatgagtactacacccctgatattcttctgatactaaaataattttcctagtgtagtctaaacttttttaaaaagacatgtaatccgcggagtttgtaactcaaaacgagtgcatctaggaggtatcgcaagccgtttctggattaaattcccagctagcttgcttgcttagcaggggcgggnaaanaagacatctgcagcctagggaagaaaacctttcgcattgttcttacgtgtttacgttattttatttcctanaacaaggcngaattgggactcgaatggttcagttggggtgggggatcccctggtncataaaangtcanaaaganggtacaggcggaacnccaagggtcgtcctgcatttanactcggaattttggtgcc

SEQ ID NO: 604 - DNA, 694 bp, Homo sapien
  misc_feature (1)...(694): n = A,T,C or G
cttttcaaatcatttttnctcttctaggtatancctgtcaggtggcctaatgtaatttttgacatctctangaattttaatagaaccagaaatgggtgccagagatatgcctgcactaatcttaagtggggatttatgtatttctcaagcaagtgattaaagcaaaactaggcacgattgaaatcaagatcttttaggcaanaaagtcatgatgagttttagaattattttaggactctgtggctttctcttcatagaaatagaaaaaaaaattgtataaaaccacaaaaggtcctgaatagccaaagcaacactgancaaaaagaacanagcagggaagcaacacactaccngaattcaaattatactaccagggtgtagtaaccaaaacagcattctattggcataaaatagacaccaagaccaatggancagaataaagaaccccacaaataaatccatatatntaccgccanctgattatcaataacnaacaccaagaacatatnttaagggacntnctattcaataantagtgctggnaaaaactgggaaatccatatgcagaaanaatgaaactagacccctatccctcaccatacgcaaanntcaacttcggaatgggattacaaaacttaagacattccaacccaagaaactatnaaanctactattaagaaaacagatcncnccc

SEQ ID NO: 605 - DNA, 678 bp, Homo sapien
  misc_feature (1)...(678): n = A,T,C or G
taaaaatctagactacactaggaaattattttantatcagaagaatatcaggggtgtagtactcatcanagctaaatgagagcgctttaaaaatgttagtttgtcttccgccatttctacagaaagctgcaatttcaggttttcaacctaataggtgatatttaagaaaaaaaaaaagcaatcgcaaatagccccactgcttttacaaatcattttttctcttctaggtatagcctgtcaggtggcctaatgtaatttttgacatctctaggaattttaatagaaccagaaatgggtgccagagatatgcctgcactaatcttaagtggggatttatgtatttctcaagcaagtgattaaagcaaaactaggcacgattgaaatcaanatcttttaggcaagaaagtcatgatgagttttanaattattttaggactctgtggctttctcttcatagaaatagaaaaaaaaaattgtataaaaaccacaaaaggtcctgaatagcccaaagcaacactgaacaaaangaacaaagcaggaagcaacacactaccggaattcaattatactaccaaggtgtantaaccaaaacagcattctattgggcataaaatagaccaaagaccagtgggaaacagaataaagaancccaaaataaatcctatatttacngcccnc

SEQ ID NO: 606 - DNA, 263 bp, Homo sapien
  misc_feature (1)...(263): n = A,T,C or G
gtggggtcngcancagccaactcagcttcctttcgggctttgttagcagacggatcatcctctagtccactgtgntcaaattccattgtgtgggggccnctcgcctcggccanagatctgagtgancanacntgtccccactgaggtgccccacagcngnttgtnttcagcangggctnacaactcgaccggcagcgnanggctggcagaantgngcgcctnnctcattcctacgcngtnngccgcaggaaggangacaggcc

SEQ ID NO: 607 - DNA, 22 bp, Artificial Sequence
  Primer
ccatgtgggtcccggttgtctt

SEQ ID NO: 608 - DNA, 22 bp, Artificial Sequence
  Primer
gataggggtgctcaggggttgg

SEQ ID NO: 609 - DNA, 40 bp, Artificial Sequence
  Primer
gctggacagggggcaaaagctggggcagtgaaccatgtgc

SEQ ID NO: 610 - DNA, 27 bp, Artificial Sequence
  Primer
ccttgtccagatagcccagtagctgac

SEQ ID NO: 611 - DNA, 46 bp, Artificial Sequence
  Primer
gatagagaaaaccgtccaggccagtattgtgggaggctgggagtgc

SEQ ID NO: 612 - DNA, 40 bp, Artificial Sequence
  Primer
gcacatggttcactgccccagcttttgccccctgtccagc

SEQ ID NO: 613 - DNA, 38 bp, Artificial Sequence
  Primer
gccgctcgagttagaattcggggttggccacgatggtg

SEQ ID NO: 614 - DNA, 53 bp, Artificial Sequence
  Primer
cggcgggcatatgcatcaccatcaccatcacatcataaacggcgaggactgca

SEQ ID NO: 615 - DNA, 46 bp, Artificial Sequence
  Primer
gcactcccagcctcccacaatactggcctggacggttttctctatc

SEQ ID NO: 616 - DNA, 1350 bp, Homo sapien
atgcatcaccatcaccatcacatcataaacggcgaggactgcagcccgcactcgcagccctggcaggcggcactggtcatggaaaacgaattgttctgctcgggcgtcctggtgcatccgcagtgggtgctgtcagccgcacactgtttccagaactcctacaccatcgggctgggcctgcacagtcttgaggccgaccaagagccagggagccagatggtggaggccagcctctccgtacggcacccagagtacaacagacccttgctcgctaacgacctcatgctcatcaagttggacgaatccgtgtccgagtctgacaccatccggagcatcagcattgcttcgcagtgccctaccgcggggaactcttgcctcgtttctggctggggtctgctggcgaacggcagaatgcctaccgtgctgcagtgcgtgaacgtgtcggtggtgtctgaggaggtctgcagtaagctctatgacccgctgtaccaccccagcatgttctgcgccggcggagggcaagaccagaaggactcctgcaacggtgactctggggggcccctgatctgcaacgggtacttgcagggccttgtgtctttcggaaaagccccgtgtggccaagttggcgtgccaggtgtctacaccaacctctgcaaattcactgagtggatagagaaaaccgtccaggccagtattgtgggaggctgggagtgcgagaagcattcccaaccctggcaggtgcttgtggcctctcgtggcagggcagtctgcggcggtgttctggtgcacccccagtgggtcctcacagctgcccactgcatcaggaacaaaagcgtgatcttgctgggtcggcacagcctgtttcatcctgaagacacaggccaggtatttcaggtcagccacagcttcccacacccgctctacgatatgagcctcctgaagaatcgattcctcaggccaggtgatgactccagccacgacctcatgctgctccgcctgtcagagcctgccgagctcacggatgctgtgaaggtcatggacctgcccacccaggagccagcactggggaccacctgctacgcctcaggctggggcagcattgaaccagaggagttcttgaccccaaagaaacttcagtgtgtggacctccatgttatttccaatgacgtgtgtgcgcaagttcaccctcagaaggtgaccaagttcatgctgtgtgctggacgctggacagggggcaaaagctggggcagtgaaccatgtgccctgcccgaaaggccttccctgtacaccaaggtggtgcattaccggaagtggatcaaggacaccatcgtggccaaccccgaattctaa

SEQ ID NO: 617 - protein, 449 aa, Homo sapien [sequence omitted]

SEQ ID NO: 618 - DNA, 385 bp, Homo sapien
  misc_feature (1)...(385): n = A,T,C or G
ctgtgctgagaaccaaaagctatgancactgcttttccaaatgtccataanaccaacatttttatcactaccaccatcacctgggagctcnttagaaagctagtctcccgggcaccaccctggcctactgaacctaatgtgcatttaacaagattnacgtngaaatctgcaaagcacaggggcngataacagtaccacctgntctggttcctanccccangacccttacagtctaactgggacacaagggcttnaaatcaaattgcctatcattaagatatacaangancntgagaaactgctncacttatntattaaggngctctaagacttagaaacnaaangcantgctgagangattcaaatatgangggggncactttnc

SEQ ID NO: 619 - DNA, 869 bp, Homo sapien
  misc_feature (1)...(869): n = A,T,C or G
gatatcccgggaattcgcggccgcgtcgacctctacttgtttagacataaatgcagtctagcattaaagatcctttaaaaaaatgttttcccaatggttaaaagacaagctcaaataaatgaactctcatacatatgccaaaattgatgagtagataaatatttcagtaggtagttactagctttctgtgtatgagtaaacatatgggagaaatttaaaacactaaagtagactcaatgaaagcatagtatcctatgtattcgtttttcagaaatgtctaatgaaggaaggaaacaatgaatgaatgcccttattcctcttagagtgctgggacatggttttgcctgaaaacttcatgtgaattttatattttgctacacattacacccatcttagacttatacgtataagacataaggcatatcttatgtcttacatgtataataatctaagcagaacaaaaaataacgaaatattttcttccccaaatttttgagacagatggattttccggaaagatgtgtttagcttttaatcctgtggttttgtgtaccacctggcacactagagtgttgctctaattcagtgagttgtaactctgggtgaacagtggaaatactagggtacattttaaaaatgctaatgctcgggcctcgctgaagaccaaattaattggaatctctgngggnggnattgatctttttataatctttctanangattctaatgggcttccagggatgaaaaccnctgntggagctnggaaccttcctttagtttggagaaaccccgatgagggtntnttaggcnccgcctntttttggcctgggcttccccccttatnntnttttggaanggnccnaattttt

SEQ ID NO: 620 - DNA, 339 bp, Homo sapien
  misc_feature (1)...(339): n = A,T,C or G
gngcgggcctcnccgtgcttgctctcgctgccgacgctctttttccaccagctgtagganaagcccgaagaccactggtcccccgggtagcccaagtaccactggtcctcctggctcctgacgctncgggtcttcctcgtggcgtagactgccagcttcggagacccctcagcccctccccgcttttctccaccccaggaggccatcagtagcgagctactgcctcggccacaacctcccagcangatagcccgcggtttccaatctgcgaaaggaggaccgccnagcccgaaatgccnagcccagcnatcactgccacgccgagccnagcgctcgtgc

SEQ ID NO: 621 - DNA, 267 bp, Homo sapien
  misc_feature (1)...(267): n = A,T,C or G
ggggngcatggtcccnggtagccaagtacatggtcctcctggctcctgacgctacgggtcttcctcgtggcgtagactgccagcttcggagacccctcagcccctccccgcttttctccaccccaggaggccatcagtagcgagctactgcctcggccacaacctcccagcaggatngcccgcggtttccaatctgcgaaaggaggaccgccnagccagaaatgccnagccnagcgatcactgccacgccnagccnagcgctcgtgc

SEQ ID NO: 622 - DNA, 847 bp, Homo sapien
  misc_feature (1)...(847): n = A,T,C or G
cttangntgtcgactgacgtcatgcatganttaaagcagaggtttggtgaaatttatgaaaaatacaaaattccggcttgtcctgaggaagagccactacttgataactctacaagaggaacagatgtgaaggatattccctttaatttgacaaataacatacctggttgtgaggaagaagatgcatctgaaatatctgtctcagtggtattcgagacatttcctgaacaaaaagaacccagtctcaaaaatatcatccatccatactatcatccgtactctgggtcccaggaacatgtttgccagtcatcttctaagcttcatttacatgaaaataaattagactgcgacaatgataacaaactaggcattggacatatttttagtacagataacaactttcataatgatgcaagcactaagaaagcaaggaacccagaagtggttacggttgaaatgaaagaagaccaagagtttgatttgcaaatgacaaaaaatatgaaccaaaatagtgacagtggcagtacaaataactataaaagcctgaaacctaaattagaaaatctgagttctttaccaccagattctgacagaacatcaggaagtatatctacatgaagaattacagcaagacatgccaaaagtttaagaatgangtcaacacattagaaanaaganttctgggctttgaagaaagaaaatgttccacttcataaagaaggttgaaagaagaatgggagagcccngaantttttgcccngaaattttcgggaaccctactggatgggtcnactggttggccatgaatgaataatggactaatcnnccaattcctngggaagggaat

SEQ ID NO: 623 - DNA, 681 bp, Homo sapien
  misc_feature (1)...(681): n = A,T,C or G
aaaactgtactcgcgcgctgcatgtcgacactagtggatccaaagaatcggcacgagcgaaaangctcangcagcccggctggccgccgccgctcctccccccaggaaagccaangtggangctgatgtggctgcangagctcgtttcacagcccctcangtgganctggttgggccgcggctgccangggcggaagtgggtgtccccangtctcagccccaaggctgcccctcacaaagcactggtggtttgcctccactgccaccttgggctccgaacccgctcccctgctgtggangcccaccgtgggaatccaggtccccaggtggactgcctgccttgccctcactgcccactctgcccacacttccctgcctaganaccgggaaggggctgtgtcggtantggtgcccacctggatgtggcagcaccgactgtgggggtggacctggccttgccgggtgcaaaagtgggggcccngggaaaagcacctgaagtggccctgaaaaatccccccttaattttnccccaatttggggctcnaacaaaaggaaattgctgaagccaanggtaccaaggtcacccctaaggccagggtgaaaaggtcccaaaattccaatncccaccntttgggcttncctcttggaaccccggccccctctcntgaanttttaaaaaan

SEQ ID NO: 624 - DNA, 661 bp, Homo sapien
  misc_feature (1)...(661): n = A,T,C or G
attggtcttactgtaccaccgggtggaaatcgatggccgcggcgtctaaatatccgattttttttttttttcctcttctgactgtccatggacaaatgaaactaacttaatctaactaaaaaacacaactatattttgaagattttctatctgcactcaaggacactttccacncggttgttgttaccttttggtcttgtctctgaacatgaaattnatctcaagggattngatttctggacctcctattcctgctatgggtttgatatttcttgggctccagggccactgttgcattgggntgacagntacctcctagcccatancctcctatcttgggaaacaaacctaacaactacgtgtaccttccatagatctctgattgagtctcagtatncgcttgctcatgggcgattcacttgaatccgtnattggtgccaacaatcctgactcatgggnnaatggatcctatcacgttcccctgattngcaacccctgtatacatanatctaatcgcatagaatctagcntnggntatgcgcggctacgctatcagggnttgntaactatngcatggctacgaancctgatcatgatcnagggtcatggactcttatcaggggggttgggccgngcttctttttcnnaccttggtaaaacc

SEQ ID NO: 625 - DNA, 181 bp, Homo sapien
gcaacaatcagatcatgttaaagtaaatctccattgccctggatcacttcaggatttaattgtccaaggagagcagggttctcctgtgaaaaaaaggtggggaaatgtttgagagtaaaaaatacaaaattcaaccggtcgaaaatacaccactccattcagtgctctacccccataagcc

SEQ ID NO: 626 - DNA, 181 bp, Homo sapien; identical to SEQ ID NO: 625

SEQ ID NO: 627 - DNA, 813 bp, Homo sapien
  misc_feature (1)...(813): n = A,T,C or G
accaagctggagctcgcgcgcctgcaggtcgacactagtggatccaaagtgaacgtgaaggtgagcagaggagaacttgcgatggcaaagttaaaaacaagaggagatgatggtcttggtgtggcacaggatgttaaaaaaattctcctgtccttaaggagttactgctatttgagtaatgtgccacttccctacatagccttctatgcagaaatgctatatttccacttcacaacccagaacgtgcattttattttacatttagaggaggaacaaacaaccagaaggcaaaaactggtgcattattttttgcaattctcttggaaagagttcgtttttaacttctgctcagacagcacacaactactgggaatatattttaatttcaaatctgatgtgtgacatctggtaactcatttattgctaatgaagttttcacaggaagcagcagtcaccagtagctcatcttatttttcagttggcaaagtgttgtttaccttttattggcctgcatcggtgtctcttatcacaggatatttaattagaaaacgcaagtagcctaacatagaanagaaatggagtggtagataatagtagatagaatggctaaatatttttattacagtgatgtaatatcactgnaatttatggttaaaaattatgtaatactcaaaaggaattctcagactggcgaaacagctggncaacagctntcacagggctttnanctcctnttgagctttccccctgntggactttagtcttccttttacncccgnagttnccattnnttaccaattgtnccgggaaana

SEQ ID NO: 628 - DNA, 646 bp, Homo sapien
  misc_feature (1)...(646): n = A,T,C or G
tttgggnggnggtgtctcntttgggtggactttttgggtcgtagggccccaaggccgttaatcccgtaataacggaagacgaagaagagtcagaagagtgcttctataaggatcgggacgagactaccttagaggaataaaggaaaaaagcagaggaggaagagtggtagaaggagtcagaagaaacccacacgtcgttctgaacctggagccttatcaaaaaggtctagataaacgatagcgatctcgatatcgagctcaagaggtaggtttagagacttctcgtcctcgagagcgaaatggaagatctcgacgacgataagaagttaaagtgtagagggtgcttgaggagcgcgtggaaggattctgcggagggacccatcgacgtagagacttgaaggcctactaaggtccacaagaagcccggctctttctccgaatggtcggagcgtacagtatgcgacgtcgatcggcagacaagctggcggtagactcgaagtgttcgggcgaatcgacttataatagtcgcgcgctagtaacgtaggaacacgaagagtagtcgaaagaaaacgtttagtgagggaaaagattagggaaaaaggagaggcttaataactaagacacttggagcctaggccaacgcgaa

SEQ ID NO: 629 - DNA, 617 bp, Homo sapien
  misc_feature (1)...(617): n = A,T,C or G
gcccccncccccctcctngggcttatngggacagacccacgtagtactctaaatcttctcctacgccggacaacggaccctataccaattcgaatcttggacactccgaccgccggattctcttcccctttcggcttcccctttctgtcggtacccctccctagtcgtctcctacaccttcgtaccgtcgatatatagtcgccgcggactagcctatttaggtgtcctagactcgttattgatccactcattagtctagtactatgcgtcacgtatcttagttgcctaagagggagattaaatcctccacaagttccgacgaattcctggactctcgtactagcaaactttcttatgaggcttccttgtatatcttctggatgtttctcgtgtcccggtcctccgctactactagagctccttgccctatctctagaagtagaggactctcgggttcgttctccaaatctagcgctagagctatcgctacccgctcgattcccccagcggaatcttgaaacctgaggtagtacacaaaccctccncatcttccctcggttgctccttcttctcatccccccttcccgccttctcgggaangaatctactttancttc

SEQ ID NO: 630 - DNA, 644 bp, Homo sapien
  misc_feature (1)...(644): n = A,T,C or G
cnntcggcntgggttttnttctgagnnncccccccccccccccccccaaacttacacccaccaaacactttccgccccctacctaggagacattagaagggtttaggcttcggcgtatagtaaagtcctctacctcggaagtagagaattcggtatttaaattcagggttagaggctcgctcgttagatttatagtttaggtttagaatcggaaaccttcgatcttccttagaagggtaataagtgaggccctaaatccgtctaaccaaggcgttaaggtccgtacctaaacctagtcttatcttctatcaggcgcaccaatataggtaggttctactttcgtataggccttaaggaatagttcggtagttatcgaaggcactcctctctaggctaggcttttctcagtcttagtactccgggaccgtcgtcgcanaaatatcgatggacggtaggtatctccgcgttacgcgtcgggctagggatatagagcgaattatcggcgagaggcggtcgctangaatcggtatcaatatgntgttctttaccctacggatatcggcagaaaacataaaaccttctnaccanggataagggattatcggacccctaaaataacagtaacatttagantactagtaccc

SEQ ID NO: 631 - DNA, 526 bp, Homo sapien
  misc_feature (1)...(526): n = A,T,C or G
ccntcggcttgggtttttttctgagccccccccccccccccccccccccccccccccggccccatagccccaccggncccacccaaattttaacaaaataaatntacctatcgntcacctatcccncgtatcgngtaggtcggtaccggtaccggngatcncnacgattnttcgggtcgtcncccttaanacggncccgtagccnccggaanaaatactacgagngactctaatntagcaanacccgccgtcnattantagcatccttagtcttccaatgncgnggattnngaatccttnnaagttatcgggtagaacgggtcccggtcccccgccctctttncaattaacgccgggtacaaantcggtttctaaattccncacgaatttngncggcaacattcncgggnccttattanccntttccaaccccgatacncnagctcgatcgggctttancgaatccggggtcncccccgangantccgggtcctttgagtngctctaggacggttacgacggagga

SEQ ID NO: 632 - DNA, 647 bp, Homo sapien
  misc_feature (1)...(647): n = A,T,C or G
tttgggnggcgggngctcatttgggtggactttttgggtcgtaggaacctggtatgaggggtgttttgagtttcttcttcgtcgtctctgggaggttcggtttcgattgagattcgggttcgtctttatcttacgaggcaccctgatattgttgcgctttggtttggttgtggagagttttgtcctactctagcgggtcatgcggatgatatgtagcctgcgtggcctgatagtgatgttgtgagcttgagaggggagttgtgggtgttgcgggcggagtaggaggggttggagcaccgggattgggagatatagaatcataagtgttaggtataggtcgattgagcgagttcgtggaattcgtgtggtcatcataattagagtgaggatgggctctatatttcttagaggacgcacggtcgtgattcggggtttgatgggtgttcttcttgtgggcacgattagcttgttcatgatggtaaggaccatactgtttcgaatgaggattcgtgtcttcggattgttgtggatattgtggnctanactatttagtgtaagccggaggtggtttgccgtggtggagtatccgannttcattcgganggtatgcgtgcggagcggtccttgtagacattccggaaaaatgg

SEQ ID NO: 633 - DNA, 630 bp, Homo sapien
  misc_feature (1)...(630): n = A,T,C or G
tccttcggcttgggtttttttctgacccccccccccccccccccctcggaaggcctctaggctcccacccgtctctctaatcctcaggaaccgatccacccaaccaacttactaatgtcctacagtaaacacccgagaatataaacccacacctaggcctccaatcctaccagggaagcaagaagccgtagtctagcgtattacgaacccgagatagagacggagatacttagttttattctctcggaataggaaagacgactggggagggaatataggctagcgcggggataggggctatggcggatatgggggcgggtcgctctcttattcttctataccacgtcaataggaatgtagatatacctagatgttcccgtagaaagagacgttagaggtctccgaagctataaaggagaggcgcgaagaaacttcgtactctagctttatataggtagtcgctctagtcccataagcgacgagagatctactagatttcggtatcgccgtcgtatgtattcgaaatagtcttcttccccttttcgatctcctctctatactacatggngattatagtcntaagatagtcaggatattaggatattagttatatgacgttcgacgggacgg

SEQ ID NO: 634 - DNA, 647 bp, Homo sapien
  misc_feature (1)...(647): n = A,T,C or G
ccntcggcttgggtttttttctgacccccccccccccccccctccactaagancttaacccaaccctatagtttactcgtataggggaatcgaggagaaataggaacgaagagcgggtgataaagagaaagtactttcctttatatgttaagagcttagcgtaatgactttcgttatatggctagttgattttatccggcgttatagggcttagttctggttatctcgggtctaattcccttagtatgctcgggagtttaacgaggtcacgggatagcgcgtaccctttctaaggttcttggaaagctattcgttatttatcgcgattctcgaggtcgaaaggatcaaggatcttcccttttactaccctagtcgggttagcggtcggtcaaaactagtgtagtacctttacctcctcgaaagttatagtcgaaacaacgtattagtcgaaattatagcggatagatcgagacggttctttctcgggttctcagccggtaatccctctatttgggggtcttctccctcttcccctttgtcttccgccttagcttccaaggttcctcggaagcgaggggttctacttaagtcgntagcgttccttataaaccncctacaggcagacccccttgtaaacggctcggggt

SEQ ID NO: 635 - DNA, 645 bp, Homo sapien
  misc_feature (1)...(645): n = A,T,C or G
ccttcggcttgggtttttttctgagccccccccccccccccccgaaactcgccttaccctagatacccaaagaatagttccactcaacttcgtctaagtaaaactctagaacttccaaacataaaagacttcgcgcggttagctacacagcctacgggaatctcacgaatcccgattcaagtcccactctcgaccacaccccggtatcgtcgttttcccataccaatgtcgaaaaataaaataaaatccagtcaagccccacggtaagcgggggtagggctaggcgaagaggcaggaaccgttcgaggccgggggctttcaaaatacaaaacaactacttaaagtttaccccttctaaagtcgggggcaacggttaaagcacgcctctaaagtactactcgtttcgagaaggggtagtcatctcccgcatagagactctcgcgtatatcaactcgcatcgcttctagcattccgacggtcgcccgcggctacatatcttgcggattagctccgagggactatagggttaattagtctagtaaattctcttagaggatagtcggggtcgtagttaggcagtacgaggggacatggnctgcgtcgtgctctaccttgacagcatactcttataaacatctttttcct

SEQ ID NO: 636 - DNA, 643 bp, Homo sapien
  misc_feature (1)...(643): n = A,T,C or G
ccttcggcttgggtttttttctgacccccccccccccccccctagcggaaaacaatccccaccgagattttattaatcgtaaaactcgccttcggtaccaagtcttcctccttcccgtaacctggctccctcctagnggctttacgaacgtccctcctcttcttacggctcggaagtggttacggttaaatccggaggnggggctaacgaatccaaggctaactcctcttanagtttgttgtccncncgtttagtaaggatccgtggagggcgagtatttgncccccggcctttattntatagttccctagtacgataaagntaccggctatcctattacagcggataaaagttatttanagggccgacgtcnccgctagacaggctacagctagnggaggtaccgcctccgactantccgttgnttccgacaaggnagtttcggttaactccacaaactcctccgccgactctanggtggggacggcagttcccncgtttagtgtgcgttatagagaagggcatttgagttggacgttacnttttaacataggttattccgtttaggttcttgcgggcccgtgggggtagtncnccggcgcgttnntatcggcgattttccgcagtttccgtttccggntnt

SEQ ID NO: 637 - DNA, 631 bp, Homo sapien
  misc_feature (1)...(631): n = A,T,C or G
gggttntctcatttgggtggactttttgggtcgtaggaaccggtatgnaggagtaggagtcgctgggaagactagaagttagctacggacgattagtgtgattccactcttaataacgagtaatcgtttacgtcgggttggtgtttcggggttttggagagtaagcgtagttgtggagtttcgcatataggtccccttacttcggcgatctcgtcttctgtcggttaggttattattgttcatccttcgcattagtagtagggttggtcggataaatcgatagctattctttagaattcgtagtcggagaattcgtgtacgaagtcctttaagttctttaagttcgcgagtaagacgtgtacggttattttgtcgtcgacgtaggtgtcgtttacgggagtttcgttttaggggtttacgtagaacgttattaagcacggtaatacgatagaggattacgcgacgtattcgtcttagaacgtcgatttttcgaaggcgcatttgttatcgaaggggagtccttggagaatcgagatattccaagaatattacggagattacagatcggaaggctcccgagatcggacgtattaccggtctcgcccgaaacgagtaggtatcntccggataa

SEQ ID NO: 638 - DNA, 606 bp, Homo sapien
  misc_feature (1)...(606): n = A,T,C or G
ccccccccccctcaaccatcnattccccacctcaacgcgaattacggtttcgaaagtcgacaataagtccggtcgagtagagggaatcaggggctggtanaaaggaccacgggcggaaaataccggtctccttccggggagcgacgtcggggaaagggaagagagcggtctagttcgtaggcaaacaggtcagaaaagttaaggttaaaggtcggaggggagaggatagctagtacgcttagttcggggctcgggcgcagggccactttcctctttcgcgttcctttactctgcttacgagttcaggctccggagttccgcgccggaggtcgtcgcgacgctaggaatggggactcgctcagtccccggttatccttcgggattctatgttttcgccgatagacggagaccgggtagtagggttccgtcgtaccgccactcgtcgccttgatccggcccgctccgcttaagggcgatgaaagattaggtattagggctctacgggacgaggcatagggcgggagaaggggggaggggtcgggggtcgaagggantaagaaatcgcantcgcgcggggtcggtagganccgaaatttttctcnncgt

SEQ ID NO: 639 - DNA, 592 bp, Homo sapien
  misc_feature (1)...(592): n = A,T,C or G
tccntcggcttgggtttttttctgagcccccccccccccccccccgggaacgagaaaacaatcccaccctaccgcggggagtgggttgnacgcttagttctagaatcctcggaatcgtcctccggcgttggtagttccggcgattccgagtatgccgaagtgtatcgctccgtctagaggttggtatctgtttatcgcgatgacgctattgactcggatgctttcgaagtagggggataggcgcatagatacgcctccgcggtgtcctctgaagtggccgcatccgtggacgcagcgtagacagctctggtggacgataacggcttctcgtactcctactccggctattatgttagagaggacttgtttctgaacggatataccattagcgaaggggtaccctccgctaacgcaggcgtttctaacagttcttccgggcgctccgaatttagattgacgcctccgcagcattgtgggatcctcttccgttagccctctttataggatttctcctccgccccgaaaganggctggtcgtccccggcangtatgtctagctcgaacgctttgttactcctttgttttcgaaana

SEQ ID NO: 640 - DNA, 637 bp, Homo sapien
  misc_feature (1)...(637): n = A,T,C or G
ctttgtggcggtggntgtctcatttgggtggactttttgggtcgtaggcttatccgggtngggctcccgaagtagcttaggatcgccggctagttccggtcccgcccgtcgaaagcgcggttcggcgggcggccccgcgttcgttcgcgggctttaccctcatagagtgccaggtctcggttcttacgggttcgtcggcgatagattttacggcgagaggtcggtatcttcgccgctttacgttcggtcggcatctacgcctagttcacaggtagtttatgcgccggagcgcgtgacggagaggttatacgggacgcggaagaaccgcctccaaatgactagtacaggctcgttcgggcgtagatctcctcgctcggtcggcggttcttacttctagggccgctctacggtttaaggcggtcgttagatcttagaaactatactcaagtttcagtcggaagaaaggaagtagagagaagggtaaacgattacctccggttctagccctttttactcgcataacgggagaacggggtccggctctcagatacgcctcgcgagacgtcgcgattcaactttaacctccgctagggcatccgtatacggttaacgcggtaaaagcgacctcggaaacctc

SEQ ID NO: 641 - DNA, 649 bp, Homo sapien
  misc_feature (1)...(649): n = A,T,C or G
ctntgtggcggtggttgtctcagtttgggtggatttttgggtcgtaggnaacctggtatgaggtctagtttcttcaacgattcttggttcagttacgcgaccctatccttatcttacaatgtcttctacatcaggttcatcaattaatatatcaattacacattaacgacggtgtgacgcaatatgagaaagtatacattaaggttattatatattattcgcttaaaaaggttcctgacatgggacaacttcacccaccattctagaagccccccctcctgtaggaccccctcgagttccccattatcttagttcagttttcattttttaaccaggagggtatcggtttttaataggtactattttgtcaaacttttcagaagctttatcttcaaatatacttgcaccatctgtactaggagcactaactattcgagtctattacagctcaacagaaaataattgaaattaaacaacctaagtatcgtccaccataaccccatcgggctctcaccccatttcttcataagttctagagcatcctgagctctttcctattacccttgatggtactcatggtctaataccccccgcagttataggtccttatggatcctatgctaccaccggtctaatcccttctatcacn

SEQ ID NO: 642 - DNA, 645 bp, Homo sapien
  misc_feature (1)...(645): n = A,T,C or G
tccttcggcttgggttttttttcgtcgcgggttactattatcgattgttacttgtaaaggcgatactcccaccgctcacgatattagacctgctcctctagaagcgaacggcgataggtctactcggccggcgaagacggcgaacgggtaggaggagccatatgcaaccctaacggagattataagtactgggaaaaatactagtattaaggtagcgggttaagataggtggagagacactattcacgagcataagcacttagaaggtcttctcgaggagaggtaggctacggactacgttccttcttcctctagcctcgagagggagtatagatgattcgcaaaagagaatccctcctatacgctggcataactagacgacgcgtcgtcgggaaatctcgccaaccctattgcgacctccaaaaggaagattgtcgtttcatagaacgctaatactccgggtcttcccgaatcatagccgcatatcggtaagaagacggtaaaatcgcgcgattctaacaagattctgtagacttaaggctaagcactagaagcgatctcgattccggatcttaagatcatactaatagttcggtcacaccagacgacgattagccactagaagccctactccgtngaaaccgg

SEQ ID NO: 643 - DNA, 586 bp, Homo sapien
  misc_feature (1)...(586): n = A,T,C or G
ctttgtggcggcggtgtctcatttgggtggatttttgggtcgtaggaacctggtatgcagggtccgcccggaattaaaagcgggatccccaaaacgnngnttcgcaagaagagaagaatcatagcgataganctttcatagtacaaaggtaactaagaggaaaataatgcagattcagaactagttgccaaattagaactcgattaggccaaggatccgagcctggcgctatcacttcgggacttaagctacggtagagcagtcggtcctgaagcatagctcccgtaggacgtaggaaactagtccggcacggaggacatactctcgagtctcggaacgtctatttagaatataaacgcattaacctcagaaggcgccgacgcggttactctctagggaactatttcattccttccggagctcccctatttttccaacacatataccggcaaaggaaaatcttntgtcctcggtctaaagagagggaaaaaaaacgatatctaggttcgggtttatccatttaaaaanatngacgcgactactccctttcaaagggagtttccccctaggnagagttcaacngaag

SEQ ID NO: 644 - DNA, 646 bp, Homo sapien
  misc_feature (1)...(646): n = A,T,C or G
ctttgtggcggtggttgtctcatttgggtggcatttttgggtcgtaggaacctggtatngagggctatttgacttgtttctcaaatcccatggtatggtgggtggcgtgcggggtggcggtcggttcggcgggggtgggggtcgtcctccaaaggagttgctagagggcttttagtggttttagggcgggaaggggttagagcggagagacgtcgtcgtggaagcttctggcggagcgcgagaaggtagttagcgccggttcggaagattctcagaattcgagaagaggtagtggggcgcggagagagagtttctaagtctaaacgtagaggtcgtcctagtcgggccgggagtagcttttaagctagaggtcgaggtcctcgtttaggctccgggctcttcgggcagtatcctctttctcgaggaacggagcgaccgacgtcgtagccggacccgtctatccgtacgtttagagatacgctcacctccacgggcgtatatgcccgtatacgtataaacgcgtaatatactcgcgcgtaaaacacgtatacactatatacacgcatcgtacggaccgtatagcgttatacgcgcgcgtatattaatttacacttatatacgcgttaacacgatatatcacacnccg

SEQ ID NO: 645 - DNA, 654 bp, Homo sapien
  misc_feature (1)...(654): n = A,T,C or G
nccntcggcttgggtttttttctgaccccccccccccccccccccggtcgacaacgtgcccaccgttgccatcccagcatagctggttcgttctgttttattcttagtagtttagttcgcctatagtccctcgtctatcgtctatcatttaaggaggcggggctcgctctttagggcgggtatcttaggtattcttctggtttcggctgccgtctcggagtctggtccttttgctttcctttcttggtcgaacttcgtgtttgatcgcgttgtttctttggggtcgtcatacctaagggccacttcgccaacaaacaagtttgtgtagtcgtttctattagggttcgctggccggcgctcttactggttggcgatttttaacgcgtttggttttaatttgcttcctcccctagggctcgctcggtcttctctctgttcgctgctctcgtccggcctttggtgcggggatagctccggctattancgtgccgtgtccgtgtggnttttgtccaatgtgaaggcctaggggtgcgggcttctttggccatggnttcccctcttgtganccttaggggtaacgantcgtaattnaaggtcgggggttggnatacgttntangggangcctgngtccgntattccttgttttggcctn

SEQ ID NO: 646 - DNA, 645 bp, Homo sapien
  misc_feature (1)...(645): n = A,T,C or G
tccttcggcttgggtttttttctgagcccccccccccccccccccacgccaagtacacagacccaccaaaaacaacgtcaacacaacttcgggtatacggaccttaagagagaccccgtagtagaccctaccacagccatccaatagtcaaacaacaagggcgcacccaatccatccatagagctatcaaacaacggaggggaaaggaaagagcagggtcaacttagcagagatcgaagtcggcactaattcctttcaagtactcgctcggcttgtagttcggggtaaagtccgctctcaaagggccaacgaggttttaaagcgacccccgtatcgagtcttcttcgtattcattaaggcgttaaaggtacgagacctagaagagagtagaattagcccaccaaatcgcctaaaccggcaaaaacgaccaaaagtcaaagacccttacaaatatcaccttaaaacgccaaccccaaaaacgcgatcagtaacgcacgtacctttcccacgcttttctttctttcactctccaaaacaaacccgaatatttagcgcaaaaaatatccgagggagaattagaagctattacccgaaaaaaaancggananggantaaatngtggggaatanacgtttggtttttctg

SEQ ID NO: 647 - DNA, 753 bp, Homo sapien
  misc_feature (1)...(753): n = A,T,C or G
accttacctggtaccgggccccccctcgagtttttttttttccaaatacaactcagattgtatacgaaaagctgataatacattgacttttgctgtttaaatcccttgagcctttgataatgattttttttgtgttaacaattgtagtatataaaatcggattcaccatccttctgatgccatattgattagtttgattttatggtgatgggatcattgtgtgttaactgtattaagaagaaatggatttgattgactttgcatccatttttatctgtgttactttcatgttttatttaaaagcatttctggaccagaataagttaagtggtataatttgctttttacacgtttatataattgaagttagcaatgtggcaaaatctctaatggaaataaaatgcttcagaatgatgacataaatctgagctatttcttgcctggagaacaagtgttattcataataatttaatagcttctgaggtgttttgttcatgtgatgaaggcttatccaccttgtatcaattcatgggctctgctttgtttaatgtagtcaggttgttaatacnagacttaagagtcatcctactgtgataagtggtgagtgaagattacatgtcttangaaaattatactgggaatatctctgacattaatgggtttaaatgttttaaggctaggggatgatgcaatgganaanatncttccaaangtttctggttgtttatatttgnggaagncatnaaganaccg

SEQ ID NO: 648 - DNA, 383 bp, Homo sapien
  misc_feature (1)...(383): n = A,T,C or G
gatatcccggggaaatgcggaggcctttnggcttacgtgtttaccgcgtagggcaaagccttgncaaattcccggccagcggagcggcgagggtggggactcacgggaagttaaacagcctcgtcggcgtcctcgaggctccaaaaccaggctctaggcggggacgactgcagccgttatggaggccaccgcggctacggccgcggctgaggcctccccaggtggagcggtggcctggaggggaatcttgatcctgggccagccacctgtcaagaggaggcggagcgtcatgcctctggaagactggatgaatattctccaggagcctgacgaaggcgaagaagtctttgcagaggaaattgaatgctgtctgatgctacaat

SEQ ID NO: 649 - DNA, 349 bp, Homo sapien
  misc_feature (1)...(349): n = A,T,C or G
cgattgtntacnagtcttagagtaagcttaagntcgntaccgagctcggatccactagtccagtgtggtgggaattccattgtgttgggtcactagtaaatggatttagctagacanagganatttaccctattccatttagcacagtgagganaggctanacagctaggatgcaataaaaaaaattttaatgagaaatgtgtgtggtagattaattctattaatctcaagttatagattaaaaaatttaagtaccncataaatgccatttgcctttgctaangntacatttttatgaanaangaccntgcatacnnaatganatactggactttnggnacttgangga

SEQ ID NO: 650 - DNA, 306 bp, Homo sapien
  misc_feature (1)...(306): n = A,T,C or G
cattgtgttgggagcatccttccatcagctcccatgagaaattctctgttgggtttaagcaatccccaaatatatcatattgacatgaatatatcatctcctcaatgtccagcattagcagacaagatgagtgctgaagatgatataactcctacctcttatgtaggctagaggtaaagtctggctctgctgactgtggggacataccgaaaaggaatgtgggttaatatcagangacctccctgcagatccganantcagggnctggactttctggganaggaagcnnaaagttatntctgaacc

SEQ ID NO: 651 - DNA, 769 bp, Homo sapien
  misc_feature (1)...(769): n = A,T,C or G
cattgtgttgggcagggtcatttctaaggcatgggctggaagcttttatttaaaactttacatgtcttagaagcactctggttgttgctaggcagacaattttacatctcttgctataccagttgcatgaagttcatcatgcatattggctgtggaaaaccttaacagcatcatgtcataaggtttcagtaaggtttaaatgaaatcatgtattaagcacttagtatagtgcaccttaaatgttagcttcaaaacaatgacaacctaactaatgttgaaagaagcttgtgtttgtaaattatgtcttattgaaagatgtcatcaaatcctgttatttctaatcccttaaagtctctcaatgtatttctttttgccatatccaatgacaggaccttagtttaagccagtggttctctcaacttctaatccagagatacctgggtgtccccaagaccttttcagagcatccttgatgtcaaaaccattttcataataatattaaaatattatttgctcattgtactcttattctctcccaaatattcagcgagttttccagaagctatataacatgtggtaacatcttatcactctgacgattaatagaatatgngnttttggattcttgngtttaaaattttctcactttggggttctaatatggnnacgattaatagatatggnctccatgaccaganggctttaaagcantcaataatttttaagagactaagnactatcctttaaagatngngaactccatcttaat

SEQ ID NO: 652 - DNA, 267 bp, Homo sapien
  misc_feature (1)...(267): n = A,T,C or G
nnangccctttaaccattgnggcctccacgcnntggcggccgctctacaactagnggatccgcnactctagnanaangattggctcttntgggntgggccggncgggctggggcgttaagcggggctgggcgcgcgccgnggttgnacnaggcgccgccgcccncacacncccggagcaccctcnttgcngccntnccccgctcaccccgcgcgcgccgntccgctttttccncacccanagcnctntttatctntgtctcctccgg

SEQ ID NO: 653 - DNA, 501 bp, Homo sapien
  misc_feature (1)...(501): n = A,T,C or G
cccnttnacccattgctggactccaccgcggtggcggccgctctanaactagtgggatccttncnatgagatgngcganggaggacnnatttgctatnctggatggggctgantcntntagctnctctagcancagatgggttatcgaggaagatgactccaangggctanantcctatgcncatcctaaaanncanctgctgtnttcagagtacgcgacacatcatcnctnatgcattgntgancaagacgggcangtgcttatcctcagcgangatgcccttaaccangagctcgaatggacntatcaccntanaggtacanntnccgcaccacacaccngcttgcnncctgacgctggactggatcncttaggccaccaatnccccgtttnccacatncctgggacnctananatactcganggggggcccggtanccaattcgccctaatactgagccttgntacgnacgctnactnggngtcctattanaacgttg

SEQ ID NO: 654 - DNA, 710 bp, Homo sapien
  misc_feature (1)...(710): n = A,T,C or G
gcgnctttancncatgctgggctccacgcggtggcggccgctctacactagtggatcccaacactgagtccaccacagnaaaactcancaccaggcagaccccacaactgcagaatccaggctgcaattcacagactaatcntctagacccacctcagtaccagatggtaccacacagctcaaggntttaggtttgcgtggtanactcaatctctatctttcaccactgccagcctgacttcagagatcctgngctctggacagtcctcagtggcaggcaactctcaggagcctcaggnttttggcacatcccagnaccagccagctgccacaggccctgaccttntancaacactgcccatgtattccagacttctancataccacagtgccatgctgattgcatctatagangctcaggtgcncctcaaanctgtgcctgctgcagnangccccacgtctctggcatgccccaatgccatgngtggnaacanttgacttctgggcatgntggaattccctaccactgancctgaccataggngggancccatttttttcgaggggggggcccggcccccaattccnccntatagngagncgtanttacgcgcnncttactnggccngtngtttaacaacgtcnntganctggggaaaacccctggnngcnacccaaattaaacngcnttgcannacatccccctttcg

SEQ ID NO: 655 - DNA, 202 bp, Homo sapien
  misc_feature (1)...(202): n = A,T,C or G
cccctttnccctttcancccccccgttttggcngccgccnacacctactncatccacccacantcgaccacccgagcttttttccgatcccancatcnatgcngattttntctntgcntgctgngcctgcacctttgntaggtcaagcctggcccatcttcgacaacttcctcatcaccaacgatgaggcatactctgacga

SEQ ID NO: 656 - DNA, 308 bp, Homo sapien
  misc_feature (1)...(308): n = A,T,C or G
gctgntgaaagaccacaccgaaaaactctnctttccgacttccacatgatgatcngcatgtggtggtgagagacttatcatgacgacatcgcttccnaccatcgcanccnctgcccaagcccattcatggaggcctgggnanttctgtgantgacntngacnctanacnctnccactgtntgctatccagacttgnttngaatatnttattggcnaaanacanttncggaatgctgtgnttgnncattgaangatctgatcactatgagagggtgaggacnncctgctngctggcantntntaacccn

SEQ ID NO: 657 - DNA, 696 bp, Homo sapien
  misc_feature (1)...(696): n = A,T,C or G
accntttccacaatnctgnnctccccgcggtggcggccgcgtcgaccagcaacctcagctgtgggtcttgttacagtaatgagttactgtaaggaaagtgtgacatttcgagcaatttgatttgtttaaaaactagagcagtttcagggttttccttgtaaatctgtcttatgtgtcttcaatgttctttcttgaggagtagagaaaggaattgttaggaatgatgcataaaccatggcttattttatctcgctgccacccataatcagagcagattcttgggactatgaccctcatggagacatgacaattgtgtgtgtggtgggtgggagaaaagagctgggaatttttagggtctagagggtccaatcaggactattttatggagctctgctcaccaactttaagtgagcaccaggggtgngaaagcgaatcttgggntcaaaanaacaatggnaaggggtaagttggtatnctgaactggccacttcggactcttatttaactgggtattctcanttaaggaggcnngggtggtcttggcttgtnaaggaaagcctgtgcaatggaatgactttaaaaccccccattaaaaaaaaaangntataaatcttgggtcttaanaangaagcctgggttctnttancccattttncccccgggaaggnaaatnttcttaggnaanggaagggaagg

SEQ ID NO: 658 - DNA, 698 bp, Homo sapien
  misc_feature (1)...(698): n = A,T,C or G
ctggactccccgcggtggcggccgctctagaactagtggatccgtgttggctcaattctcaaggctgttgctgtgcggcctgttccccacacgtgctgctcagctcaggcaagcaccgagcttgtgttgtttcatgctcagcgtggaggcccctcctccaggtcgctgctctgtggggttcccatacactcaggctcctaggaggagtccatttagaaagccagggtttttctcagagtcttagttccttgtgctgtcatccatttcacacgacttgggccctgctcggggcaacacagcaagagaaaagacagggaaaataagagagggaccttgcacacacacgctctggaccacagagccctgtgcccagctcctctgtcaatacaggtggaatctcgtgcaggatcgcaggggtctgtgatgccaccaaagagcaggccgggacagggttaggagagaaaggagagggaagtgggggtttctcctacgcactcttatttgcagagggaaaggcgggtttgtattggggttgtcggtctttgcacccacngcacagttgtgagacacccccatcctnagatcaaagccccacatacagcttggggaaaaacaaaacnaaacaaaacaaaaacagtaaacctccatgccanttgttgggnaagttttnaatttncttccccnacccancttgcttc

SEQ ID NO: 659 - DNA, 750 bp, Homo sapien
  misc_feature (1)...(750): n = A,T,C or G
ncaanctggnctccaccgcggtggcggccgctctagactagtggatcctcctcatgggcctggatatctctgaacatatgatgaacattgcttatgaaaaattatttgtangaaaattgtgaggcctaagaatgntattttcttttagtgatggtctttgtttgcttctgtaaggnacttgtgggcactcgtaagcttggatctctttaatctaataccagntttgagattttcttggccccatagatgaattaaaactggcgtacttcttgtttacaaganggataagtctcctagggtaagtcttttggggtcccaagtcaaaaagatgagggatttaccagttctctaaccttggtagccccagactccaaactttgccttctagtcccaagaggctatcaaaaagcaaaggccatcttccaccttcttttccanaacagcacacattccagacagtacttgaaagcaggaacctccttatcccttaaaaacctcttggaancatcttccctctcttgcttctactatgcttggcccacctancattcncntttttctggaaaccggaaaaancttntgacttnngttggctacattcagcttggccccctacaatntggtttccatctgccctaangaaattttaaagggcactttttttntggcccctgactttcnntttttagggctttcccccangctttgcccctttggttaaaggggttattttccttccccttttggaag

SEQ ID NO: 660 - DNA, 849 bp, Homo sapien
  misc_feature (1)...(849): n = A,T,C or G
tcggatccactagtccagtgtggtggaattcgcggcccgcgtcgacgggcagtagtggtatgcntntctaaatgttataattatttcagaattactctgccagaaagttatgatcatacatagaagagtttgtagctaactttgaaagtagtggaaagtggttttcatgtattgtttgggttaatttaattttgattatatttggtttttagttcaggtaatttttttgttgaaaacttcaaatgacaatttcttcatggttactaaagatcactcatgtggagtagtttcagatttttttctgaatacatgtattacttttagagatgtaaagatgtgaaattactaagagagaaacccatgtgatttgtttagtggatcaaaagtcggtagctcctttgatcctaagtgccactgatagttaaatagatactgaagctatgggcaggctggattgataagaaaaaaggagacagagaaatgggaaattgggaaagaactgtgcaaataggaaaaggagagagcaacagaacagaattagtaccacagtgccgaagtgccacctcaggtacttccatctcccatctcctgaagaattcagtaacagtttgcaaatggtcaacacaatcatttagtgatcctggttgatattttcaatactttctggggatttcttggctggnttcaaaagatgatgctgatagttttattgcccctgaaggtattctgaagnttancataatttattggtcagtaaaatatttgaataaaagnggangaaggaaaatctggcntcttattttgggatntcngcngggggaangaggatataattnaccccggccttgg

SEQ ID NO: 661 - DNA, 653 bp, Homo sapien
  misc_feature (1)...(653): n = A,T,C or G
aacttaagcttggtaccgagctcggatccctagtccagtgtggtggaattcgcggccgcgtcgacctccattcgtttcttgtccttttttttcattttttctcatgttctattcactttaggtttctaagataaatattataaaataatttttacttataaattattcactgataccctgtctttaacatgtgaaatgaattcaaaaggaatcttaatgagaaataatatactcatgatgtttaatagatttgatttcgaaataataagccctctgaagtcctaagttaaaaataaagcaacttgtttgataatttttcatcaagaatgtatctgagtctctgagtaattattagtaggaatattccattatcacaattacacagtataagctatttagtctaactttaccaaaaaagggagctacttcaacactgtgtgagacttttaatgggtttgcattgggtatgcactattagcaagataacctattttacagcagtgtttnttaacctttcccatttatttgaaaggcagctaagatatagtagttaatntaangggctgatgcatttatattacatgtaganaatgggagatacnaaagggagngggggganatnttttgnattcnnaagcttcnttgncaattaa

SEQ ID NO: 662 - DNA, 646 bp, Homo sapien
  misc_feature (1)...(646): n = A,T,C or G
aaacttaagcttggtacccgagctcggatccctagtccagtgtggtggaattcgcggccgcgtcgacccagggacaggcagccagngctggggtcaccagggtcccctcttgggccctccaanagcaacagtactggcaacagctgggatttgctgagcacagactctgcagcaggctcggttgagctctctgtgcctgttccttcataccatcctcacgcccatccatgagatgggtccagctgttttcagatgagaaaatggcacaggaagctggtaagtgacagtcagaaatgaatgctggcagcttantccttggacccaccgcagtgcaggaccttgctcaacagggatcacccttgtccgccacctgttcatgaggccacccagggtttgtgtggtcatttgtctcctttcatctgcttgccttcaaccagctgggtcattagggctggggaacccagaccccacacagtccttctcccagangccagacacannctncgccacagnaaggacttcagtccccgaancaaatgtncctgggcgtanaaactgnagggnccccaatccctggtggggtactgctttgcactggnggaattcacccctcattgnnaacctttccctnttnncacccctaaac

SEQ ID NO: 663 - DNA, 650 bp, Homo sapien
  misc_feature (1)...(650): n = A,T,C or G
aacttaagcttggtacccgagctcggatccctagtccagtgtggtggaattcgcggccgcgtcgacgtcgacgcggcgngccgtttcgacgcagttgatacatattattatatactacatnggttttctagaattaaaaaattaatgtgtagtgccagccctagatgtaagttacatatatcaactctatccaattttgtcagccataaaacttacctttttcacatacttctaactctaacaatgtgagaaatgtagatcattgcaattatacccacaaggcagatggctacatgcagaatggatagcagaatctagctacttacgctagccacatggtagacgttttttcctttgtttttgcaaaattgcaatataagttgcatatcgttagagtgaaaagatgtaaagaacccatagaagccagtgatgaaggacatttatattttcacctttacaaangaccttaaaattgcctatgtggagcagaaactggaggagggcnaanccatcngtaaaaaaaattttgntnctatttggatttgggcaccattattacctccccaggtncctttttgntttaacctttcttttaaaaaaaataattcntaatttttgggcaaaaaaaaacaaggtttttatttaaattt

SEQ ID NO: 664 - DNA, 678 bp, Homo sapien; identical to SEQ ID NO: 605
  misc_feature (1)...(678): n = A,T,C or G

SEQ ID NO: 665 - DNA, 694 bp, Homo sapien; identical to SEQ ID NO: 604
  misc_feature (1)...(694): n = A,T,C or G

SEQ ID NO: 666 - DNA, 705 bp, Homo sapien
  misc_feature (1)...(705): n = A,T,C or G
tttaaaaatttagatacactangaaaattattttagtatcagaagaatatcagggggtgtagtactcatcagagctaaatgagagcgctttaaaaatgttagtttgtcttccgccatttctacagaaagctgcaatttcaggttttcaacctaataggtgatatttaagaaaaaaaaaaagcaatcgcaaatagccccactgcttttacaaatcattttttctcttctaggtatagcctgtcaggtggcctaatgtaatttttgacatctctaggaattttaatagaaccagaaatgggtgccagagatatgcctgcactaatcttaagtggggatttatgtatttctcaagcaagtgattaaagcaaaactaggcacgattgaaatcaagatcttttaggcaagaaagtcatgatgagttttanaattattttaggactctgtggctttctcttcatagaaatagaaaaaaaaattgtataaaaccacaaaaggtcctgaatagcccaagcaacactgaacaaaaagaacaaagcaggaagcaacacactaccagaattcaaattatactaccaaggtgtagtaaccaaaacagcattctattgggcntaaaatagaccnaagaccaatggaacagaataaagaacccaaaataaatccatatttttacagccagctnattatcaataaaaacnccaagaacnt

SEQ ID NO: 667 - DNA, 817 bp, Homo sapien; identical to SEQ ID NO: 603
  misc_feature (1)...(817): n = A,T,C or G

SEQ ID NO: 668 - DNA, 826 bp, Homo sapien; identical to SEQ ID NO: 602
  misc_feature (1)...(826): n = A,T,C or G

SEQ ID NO: 669 - DNA, 547 bp, Homo sapien; identical to SEQ ID NO: 601
  misc_feature (1)...(547): n = A,T,C or G

SEQ ID NO: 670 - DNA, 232 bp, Homo sapien; identical to SEQ ID NO: 600
  misc_feature (1)...(232): n = A,T,C or G

SEQ ID NO: 671 - DNA, 214 bp, Homo sapien
  misc_feature (1)...(214): n = A,T,C or G
ctccccttccntccttcgctactncncattttcnnaaatttntttcgcntatgnggaaaaacacccacattnttcanctcgcacagaacangnnggggtgtgtaaaatgaagggcttccncnctttctcttattnaanaacactnaaanagggangggctaaaacccgcgngatntctacnctatcgcgggcgcttttggngttggctagaaga

SEQ ID NO: 672 - DNA, 328 bp, Homo sapien
  misc_feature (1)...(328): n = A,T,C or G
ngancagcggngtttaaacgggcctctagactcgaggagacncctgttggatggtggatcacanntcgntactactatacaggacagagtatcggganctcttggntgttggngcctgccaaccactgctnctgttaactgcgtatctgaagggactcggactggcttcagaagaactaccggctcgaatgnaccatggatgattcncnctagttgaaaaaaaactcaggcacatgtattgccactgatgactagcgccagactnctctcggctctntaacgagcccacatgncngtgtgncncccgtgctgnctccagaagaggttc

SEQ ID NO: 673 - DNA, 223 bp, Homo sapien
  misc_feature (1)...(223): n = A,T,C or G
gggggcaaagctggctagcgtttaaacttaagcttggtaccgagctcggatcccnnagacattgtgcatgaaaatgcaaattgagtgtggtctatantgccatcntcacctnctgncngctcaaaacaacngctttctgctgcaatgggtagggctcctnacncacggtcgcnnacggaggccnncttatcctcntcggtnnggatccctngaagcatnttct

SEQ ID NO: 674 - DNA, 256 bp, Homo sapien
  misc_feature (1)...(256): n = A,T,C or G
gnggggtcntngatgagcgcgcgtaatacnatcactntcnggcgngntgggtaccgggccccccctcnaagcggccgccctttttttnttttttttcatnacatgataanntctttnttctaaacagaccacaccactanagttcctttnctttngtacggaattgagttaaagtagagnatacaatgcagggcttcnnctctatttcacattccaggntggttcngnatggatcggccctgcctctccgatgggt

SEQ ID NO: 675 - DNA, 439 bp, Homo sapien
  misc_feature (1)...(439): n = A,T,C or G
nnactagtccagtgtggtggaattccattgtgttgggcttgtatgggtttttttgtctagttntttgggaaatgttngtgttactatnttttggatatnatatatgatatgtatggcccttctatgggctcctcanacngaactcaaccattttccacaaaaccnattcctcctttcccttcatgactgagtggtgttggtactatccnggaaactgggacattgtccttcacatctntcccttanctgcctngtccnattgatgtctttgagctntganatgtctttgttaactntctcctncntctgtactgccggcanaattaagcaccatntgtcacaaaaagtattgcgttaccttcacgnatctgttngttnccatncttgctgcttctccngnggaaaataggctnttctggcaaccgaacngaanaaatac

SEQ ID NO: 676 - DNA, 587 bp, Homo sapien
  misc_feature (1)...(587): n = A,T,C or G
nggnggcctnattaagcgcgcgtaatacnactcactntggggcgaattgggtaccgggnccccctcaagttnatntgccnaacctctcttttggaataacaaaaggtttaacacatatgtcctcatagggacgcgctttcacacnttcctgacngcttcatanacntcattnctatttctcctcagnacaagttnaggcngaaggtgaggcanacnttataatttccatttcacaaatncggaaagtgaggctcaaagggnttaaaaaataacctgatacaantcatagagccggtntctggaanaagcaggagcaaagtccaggcatcctgatccaagctnggtccactgccttccactctggagaggcttcatctccgacaaaggaagggacntgagtggctgganaatctcatgggataaagacctcagnatttcatgctcctggaaatcccatgggttgaacaacaggtntttggcccgtggttctntccctttgnccatcttttaaccttggggtaaatgatggcntctntnagcnttttttttnaaagagatngaaattgaatgattattngctcattggg

SEQ ID NO: 677 - DNA, 444 bp, Homo sapien
  misc_feature (1)...(444): n = A,T,C or G
gtggggcatnattaagcgcgcgtaatacgactcactataggggcgaantgggtaccgggcccccctcgaagcggccgccctttttttttttttttactgtccaaactntctatngatntagttgaactgtncaacgatttcatgaaattctatacacanagccttcaggtccagagagtaaaacaaatttaaatttnttcaccanattgnagcagncanaagcatccnatnatatccgactacaatgaatnatatgctnanggtanctnatttacccactntggggtctttanggtctgtcacaaactattttcgtaaacatcnntttaaanttnggtgaatggacctaatnccagataantctatttnatntaccctagcatncctgtggctnactttncgggctgtgttggcntacttttaggagaaaattggtataaatnn

SEQ ID NO: 678 - DNA, 670 bp, Homo sapien
  misc_feature (1)...(670): n = A,T,C or G
actagtccagtgtggtggaattccattgtgttgggagcagtttaaaaaaaaaaaagacnaaatatacnactcttgatnaaacataaaggtacagtggtctatgaggaanagaaaaggtacctnaggatgcaaaantacctaccacatgggaaccgttngtccacactcattccnnanaaaaccgagtcctctcanttncacacgtgtacgtttcagttgggaagtgcttgccattactccnaagcctagaaccttcacgtcctgaaggttctggaaggtttttcagattgcttaaganacgcngcccttccatattcntctccactacccnggggaacggaacaaatggagctgcgacngggaagcgtcccttcccntccgaacgctttctttcaaacctgcctgccttccnggcgaatggaccggaaggtttnctngcttcctttcancccnaattacttcctgngttgaaaattggcctgttggtttgcaaatgcnggaatttgtttactttcntcatgtcctgtgttgnncnaaccggctcncttgttgcctccctttngaaaggttttcatcaggccccgccctttctcttntaanngtcctaatccggncnggaccactcggggaaaattttttcttttcgaaaagccgccccntccgtccggct

SEQ ID NO: 679 - DNA, 449 bp, Homo sapien
  misc_feature (1)...(449): n = A,T,C or G
actagtccagtgtggtggaattccattgtgttgggagtaggtctactacancctacttcccctatcatanaagancttancaacnttcatgatccccccctcntannccttttcctcanctgcntcctagtcctgtttgtcctnttcctaacantcntaaganagatnactaatnctactatctctnacctccggaanctacaanacgtctggaactattcngaccccatgcanccncatnctccatcgtcctcccagcccctncccttcctttacnttactnaacgaaggtcgacgatccctcccntacctcccnnnccattgggncccaanggnactggacctcacgantacaccnactacggggngactaagnctgnaactccttacatatntccccgttacccccngaacncagcgaacngcnacaccttggacntcaagaanta

SEQ ID NO: 680 - DNA, 670 bp, Homo sapien
  misc_feature (1)...(670): n = A,T,C or G
tttcngtgtggtggaattcgcggccgcgtcgacgagaaganggaggagganaaggagaaggagaagaaggagaanaaggaggagaaggagaagaaggagaagaaatcatcatcatcatcatccactgtctngcaactatttaagtttgcnantcccttgaaaacaggtacttttgtttcaatgtttgggaccactnctgacnatgannagaanaccaataaatgcttgatnaatgaaaaanccactttttacctgttagaaccctgaggctaagagaantgatgtgactcgacttagttaccacaaactatgatcctagcatnaattggggcatctcaacacctcaactccctgtgcaagaacagattttcaatgtctactgatgattttaaatggattanttcctctctttacttcttaagggcatgaagntttatgaaacaaaactatncagttccagacgcttaacccacatagtgttaatagtcaccttcaacacacnactaaacccccaaaaaangntttttacggngtttcgacagttttcttttctttttgacttgnttaacacccnngacaactttgtnctntttccntgaatcacanctttcnaananccaatggtncggttttttctcnttcngggcccttcccttnttnaaaaccanat

SEQ ID NO: 681 - DNA, 494 bp, Homo sapien
  misc_feature (1)...(494): n = A,T,C or G
tcatggtgtccacagtctgatgtgagcgcattaaatttaaggatctccgcccttctccttaaaactcaggacttggcaatgancctaggaagcgcccctcccctccccanccanatccaagccccggaccgctgcgnctccagctgcgcctagtgaaaccgccgaattcgaattcacactcggngggccggcgaaggtgtgcgcgcccgcgggagcgccggggcnagcccgagggactgcaagccaanaanggaggcatgggtggcggggggcgccgtctgatccaggaaggagcggaggcgccgatcacacactcttnagacgccctgcccgcgcctggccagcgcgcagnctgcaggacgcgcggagcaggaactcgctggagtttgccaagccccangnctctggaaagtntgtagctccctttcggancgnctcttctggccctttgggacgggtgtgtcattgggcgggggtctgtataagggggggac

SEQ ID NO: 682 - DNA, 263 bp, Homo sapien
  misc_feature (1)...(263): n = A,T,C or G
tgatcattcaagcgntgngcgnataacgattgctnagcccaacctttcatagggtcgttcctttgggaatnggatgtctattgaatggcagggataggggcactcggcattcgcctctggtacagttttgcatatatatcctcatcgcgagcgagcgtaggggancgttaagtttggggaaatgccnccgcatgnccctnccggagcttaaacccccaacaatncccattttnaaaaaagntttnttanttaaaaaaaaaaac

SEQ ID NO: 683 - DNA, 255 bp, Homo sapien
  misc_feature (1)...(255): n = A,T,C or G
cttgcccggcatgcacagacntntttacggacacnctactccaagngagcctgnanctgtctacggtcaanctctaaggttngncantgccacanatggcatagtcccgagggcggtnantctggantgctctctgcacttgaacntaaagcgcntttcaaganaggnctaatngcctgcctcttgacaacnaacaancccacaccnacctangaccctntangcaaggactggattctgnaaatgcaatacaca

SEQ ID NO: 684 - DNA, 922 bp, Homo sapien
  misc_feature (1)...(922): n = A,T,C or G
acccttcatttcatgtgcttctattttcctacatcttttacatgactaagggattaatgaaatcacctcttcataatcatgaccataatttcatccaacaagtactcaagtttggtgttagcactttattaatgcttacgaattctctctctctccctctttctcttttccttagtccttgcacaataaggatttttgaatgtataatatcatcttaggtaagctttcatatggttttggcatatgaagcttatgactgtcataagccataccaagcctgtggagtatggcatgattttcattacataatccaatgaaaatagacttattttaaatccctaactttgtagttttaatttgtatttcactatcttgaaattaacagctagtacttatccatcacagcagtctcctactgacatgaagcaagttgttgaatgcagtagancatgaatgaaagcatttaatgttanacaaaaatgggtgatacccaagcattctgaattatttgcatcaaggaatgggacatgtacattagtggcatcatttctaccaatatgtgacttgaattgtttttttaaaaaaagganaatgantttctcaatttgctttaaaaaattttnaaaaagttcaatggcatgctgctttgtctggacttaatttattaacaattnttaanccttccttaaggacanaattttggtgttcaggatcnccctgaagggtcttatttttnatannattccaaacccaaaaggtggtttaaaatgggngggttccccccncnaaaatttggaccggcttttttatatttaaaaaanttnccntttgngtttgaaanctnaataccaattaagggggaattttacctnccagtgggaaaaaaaaacnctngccnttnaaaaaattcccnggagncaat

SEQ ID NO: 685 - DNA, 531 bp, Homo sapien
  misc_feature (1)...(531): n = A,T,C or G
tgaggctctgtaaaactgttcctctgctaggcatacttcatattctctatattaaactcatctttaattggcatggaagattcattgttccaaatctcagatgaagatcctatattggatgcaattaagcctggcagcgccctcaaaagacagtcttgtcactgctagccacagccaggacacagtaacagttccttctagtgacccnagaccataanaaatananatctaaagaattctgactccaaaggcattagcccattcctggtattgccaattatgatagaaaaaattgccaagctcctgggacatggaaatacactcagtacatttgagaactggagaactantttccaaaatagtatgaagacatganggtgattgtagatatntgagtttggagaanttgagggaaatcngattacacatgtttactacaagagatgttnataagtaaagaaggcctgatatacaatctaacagacnantgagataaatcttaantcacaactgacntcccttttggggcgg

SEQ ID NO: 686 - DNA, 336 bp, Homo sapien
  misc_feature (1)...(336): n = A,T,C or G
ggngncctnatgagcgcgcgtaatacgatcatatagggcgaattgggtaccgggcccccctcaagaacactacaagctatgtcctcttctcanagagccctgaanttttaacatattgaaagctctnatcttgccaaanaactccacttaacttcaaaacacaccctccacacacatcatgatcaactnagatcttactgaaccagaatcctnaatggcatacttcaggaacaggggtccanagaagcagttctcaaantgcagctnaaaaagaaactgaaaacccaattcatgcaanacctagggcttatttgagagcattttccagtgcagatt

SEQ ID NO: 687 - DNA, 271 bp, Homo sapien
  misc_feature (1)...(271): n = A,T,C or G
aatctgcactggaaaatgctctaaaataagccctaggtcttgcatgaattgggttttcagtttctttttaagctgcactttgagaactgcttctctggacccctgttcctgaagtatgccatttaggattctggttcagtaagatctcagttaatcatgatgtgtgtggagggtgtgttttgaagttnagtggagttctttggcaagatcagagctttcaatatgttnaaacttcagggctctctgagaagaggacatagcttgtagtgtt

SEQ ID NO: 688 - DNA, 740 bp, Homo sapien
  misc_feature (1)...(740): n = A,T,C or G
tgatgaagcgcgcgtnntacnactcactatnggggcgaantatgggtaccgggnccccctcgaagcggccgccctttttttntttttttgtgagagtttaaataaaatatttgagtttaatttaaagtttgagtttaattaaaatatatggcatatcccaagttgggctttgcanaaagaacacttctcaggaactgttagttggtgtaccaggaactcagaagggtcctgttattaaatatatttggaaaatgcatggattctctgaanatcnctctgcatgtgagcaacacttacatcncaaaccaaaattggcattgcatacatnaaccaatatttcccaaacatttctggttatggcccaccccctttgtgtantacttattgctgttttttggaaccctggggaaattacttaaaatattcagctggaaattacaggcgttacttttaagggancaagaattacagtgactcccaaaattgcaagtgttgattactatttaagaacccaagaatttgaaagaaattttgaaaagtgaaaacnggaaatnttaaatgacttctcaaattttgaaaactcnggnaaacatctccactttggtncccttcctttaaaaattggctaaaaattntttnttatncccaccccattggaantnccccccccctggaacaattggattcccctatttcctaaaaaacggccnccccccccggggngaacnccnacnttttgn

SEQ ID NO: 689 - DNA, 635 bp, Homo sapien
  misc_feature (1)...(635): n = A,T,C or G
actagtccagtgtggtggaattccattgtgttgggattacatatacttttagcaatttttaaagaagtgtacaaagttgagatgtttcctgagctctcatatatctganaatgtcattttacatctccgtcttcacctctcaaaacttctttcaattctttggctcttaatagtaatcaacacttgcactctggagtcactgtaattcttgctcctttacagctacncctgttatttccagctgaatatttttagttatttcccagggttccaaaaaacagcaataagtactacacaaagggggtgggccataaccagaaatgtttgggaaatactggctcatgtatgcaatgccaaatctggtttgcnattgtantgttgctcacatgcagagtgaatcttcaaanaatccatgcattttccaaatatatttaataacagggaaccttctganttcctggntacaccaactaacagttcctgaaaaatgttctttctgcaaaacccaacttggggatatgccatatattttaattaaactcaaactttaaattaaactncaattattttattttaaactcctcaaaaaaaaaaaaaaaaagggggggcccttccaanggggggnccggttcccc

SEQ ID NO: 690 - DNA, 3923 bp, Homo sapien
acagaagaaatagcaagtgccgagaagctggcatcagaaaaacagaggggagatttgtgtggctgcagccgagggagaccaggaagatctgcatggtgggaaggacctgatgatacagaggaattacaacacatatacttagtgtttcaatgaacaccaagataaataagtgaagagctagtccgctgtgagtctcctcagtgacacagggctggatcaccatcgacggcactttctgagtactcagtgcagcaaagaaagactacagacatctcaatggcaggggtgagaaataagaaaggctgctgactttaccatctgaggccacacatctgctgaaatggagataattaacatcactagaaacagcaagatgacaatataatgtctaagtagtgacatgtttttgcacatttccagcccctttaaatatccacacacacaggaagcacaaaaggaagcacagagatccctgggagaaatgcccggccgccatcttgggtcatcgatgagcctcgccctgtgcctggtcccgcttgtgagggaaggacattagaaaatgaattgatgtgttccttaaaggatgggcaggaaaacagatcctgttgtggatatttatttgaacgggattacagatttgaaatgaagtcacaaagtgagcattaccaatgagaggaaaacagacgagaaaatcttgatggcttcacaagacatgcaacaaacaaaatggaatactgtgatgacatgaggcagccaagctggggaggagataaccacggggcagagggtcaggattctggccctgctgcctaaactgtgcgttcataaccaaatcatttcatatttctaaccctcaaaacaaagctgttgtaatatctgatctctacggttccttctgggcccaacattctccatatatccagccacactcatttttaatatttagttcccagatctgtactgtgacctttctacactgtagaataacattactcattttgttcaaagacccttcgtgttgctgcctaatatgtagctgactgtttttcctaaggagtgttctggcccaggggatctgtgaacaggctgggaagcatctcaagatctttccagggttatacttactagcacacagcatgatcattacggagtgaattatctaatcaacatcatcctcagtgtctttgcccatactgaaattcatttcccacttttgtgcccattctcaagacctcaaaatgtcattccattaatatcacaggattaacttttttttttaacctggaagaattcaatgttacatgcagctatgggaatttaattacatattttgttttccagtgcaaagatgactaagtcctttatccctcccctttgtttgattttttttccagtataaagttaaaatgcttagccttgtactgaggctgtatacagcacagcctctccccatccctccagccttatctgtcatcaccatcaacccctcccataccacctaaacaaaatctaacttgtaattccttgaacatgtcaggacatacattattccttctgcctgagaagctcttccttgtctcttaaatctagaatgatgtaaagttttgaataagttgactatcttacttcatgcaaagaagggacacatatgagattcatcatcacatgagacagcaaatactaaaagtgtaatttgattataagagtttagataaatatatgaaatgcaagagccacagagggaatgtttatggggcacgtttgtaagcctgggatgtgaagcaaaggcagggaacctcatagtatcttatataatatacttcatttctctatctctatcacaatatccaacaagcttttcacagaattcatgcagtgcaaatccccaaaggtaacctttatccatttcatggtgagtgcgctttagaattttggcaaatcatactggtcacttatctcaactttgagatgtgtttgtccttgtagttaattgaaagaaatagggcactcttgtgagccactttagggttcactcctggcaataaagaatttacaaagagctactcaggaccagttgttaagagctctgtgtgtgtgtgtgtgtgtgtgtgagtgtacatgccaaagtgtgcctctctctcttgacccattatttcagacttaaaacaagcatgttttcaaatggcactatgagctgccaatgatgtatcaccaccatatctcattattctccagtaaatgtgataataatgtcatctgttaacataaaaaaagtttgacttcacaaaagcagctggaaatggacaaccacaatatgcataaatctaactcctaccatcagctacacactgcttgacatatattgttagaagcacctcgcatttgtgggttctcttaagcaaaatacttgcattaggtctcagctggggctgtgcatcaggcggtttgagaaatattcaattctcagcagaagccagaatttgaattccctcatcttttaggaatcatttaccaggtttggagaggattcagacagctcaggtgctttcactaatgtctctgaacttctgtccctctttgtgttcatggatagtccaataaataatgttatctttgaactgatgctcataggagagaatataagaactctgagtgatatcaacattagggattcaaagaaatattagatttaagctcacactggtcaaaaggaaccaagatacaaagaactctgagctgtcatcgtccccatctctgtgagccacaaccaacagcaggacccaacgcatgtctgagatccttaaatcaaggaaaccagtgtcatgagttgaattctcctattatggatgctagcttctggccatctctggctctcctcttgacacatattagcttctagcctttgcttccacgacttttatcttttctccaacacatcgcttaccaatcctctctctgctctgttgctttggacttccccacaagaatttcaacgactctcaagtcttttcttccatccccaccactaacctgaatgcctagacccttatttttattaatttccaatagatgctgcctatgggctatattgctttagatgaacattagatatttaaagctcaagaggttcaaaatccaactcattatcttctctttctttcacctccctgctcctctccctatattactgattgcactgaacagcatggtccccaatgtagccatgcaaatgagaaacccagtggctccttgtggtacatgcatgcaagactgctgaagccagaaggatgactgattacgcctcatgggtggaggggaccactcctgggccttcgtgattgtcaggagcaagacctgagatgctccctgccttcagtgtcctctgcatctcccctttctaatgaagatccatagaatttgctacatttgagaattccaattaggaactcacatgttttatctgccctatcaattttttaaacttgctgaaaattaagttttttcaaaatctgtccttgtaaattactttttcttacagtgtcttggcatactatatcaactttgattctttgttacaacttttcttactcttttatcaccaaagtggcttttattctctttattattattattttcttttactactatattacgttgttattattttgttctctatagtatcaatttatttgatttagtttcaatttatttttattgctgacttttaaaataagtgattcggggggtgggagaacaggggagggagagcattaggacaaatacctaatgcatgtgggacttaaaacctagatgatgggttgataggtgcagcaaaccactatggcacacgtatacctgtgtaacaaacctacacattctgcacatgtatcccagaacgtaaagtaaaatttaaaaaaaagtga

SEQ ID NO: 691 - DNA, 882 bp, Homo sapien
  misc_feature (1)...(882): n = A,T,C or G
ttactcactatagggctcgagcggccgctgaattctgctgcagtgagctgtgattatgtccctgcactccagcctggatgacagaacacgatcatttctctaaagacaaacaaaaaacataaaataaaactagtataaggatagaagcccagggttgatttaagtctgcggaaatcataaaccataggtcagacttctcattgatgaggtacttgtgggttagaatacaattaggtatatttggtctagaaaccaggatggaattagagaataaaagactgagcaatagcatgttatagtattagaaatactatagaaataggaaaagccctgattatgactttggagttctgatccaacatctgggattatttagatattttaaaggaaaacgatgacttttagctctcaggatgttagtttcctcaaccataaaatgaagagcctcgaaaagatttcgtttaccagattatttctgaagtcaattccagttctaaaattccatcactgngcactaaggcaaattgaattgaataaagtattgggnatgcataaaatactctatttttaaaaangaatagtaattatccattggnaacagacgcantcatccagncatctcctaccctgncccatgncntatgtaganatgtanctctaatcccttaacaaaccgattttgcaaaggagcttanccttggggtacttggtcanggcaactggtctactttnaagactcatcttcacttactgggcaccaaatncctaccattgcatcaaactggggttcccatncaaggcaaaccctgngaaatctttaatcccgaaattggcgcccaattttgnggggtttccnaaaagaatcntcccccccgaggggcc

SEQ ID NO: 692 - DNA, 235 bp, Homo sapien
  misc_feature (1)...(235): n = A,T,C or G
ccgcactngtaangnccgccagngngctgnaantccgctnagcncggatccactagtccattgatggtaaaagggtagcttactggnatgtccgnctgctccanganataatacncaggacttctcanagcacttaatatgttaatataaaactncgngaaaaaagatnttcnatgaancnttcctcttaggaggtcaggngagaatagtgttaatgncattaagganagaacga

SEQ ID NO: 693 - DNA, 383 bp, Homo sapien
  misc_feature (1)...(383): n = A,T,C or G
nttatgtaagaaatgtcatatatcttttattttctttaaatcaaaataaatatgactttgagcatcccatcccatgccccatcctatcagaatggtaggaacatcaacacaaataattagtaatgcaccgcatctacattcccatgctctctttacttcttcagcattgcctaaaggcataatacacctttaattaattaattcagcctcctaatgcacattaacaaagcccctgctagactctgtccataatggnaaacctgnatgatccttgatattaacantttaaggaatgctcatggattggttncagacttaaaaaattgagggggctgaanaaaatctaangganaaatcatggaagcatttgcacatattacata

SEQ ID NO: 694 - DNA, 204 bp, Homo sapien
tctcttggctggtcagcctgaagggtggtaatgactcaccaacgctactaatccttcttcactgtcccttatttttttccctcccaggctcataactcgaggttaaactctcttttatacaagaaccctgtctgatgaagcatcatttcagaattttaagtcaacttacaaatgtggtattattcacatctgagtacaaattta

SEQ ID NO: 695 - DNA, 670 bp, Homo sapien
  misc_feature (1)...(670): n = A,T,C or G
gcaccagcccaggtgctgtttcttcacttgagctccatgaccctccctgtgtggtgggttgaacggtgacctccaaaagatatgtccacctggaacctcagaataagatcttatttggaatagtctttgtagatgtcagtaaggtaaagatttggagatgagaccctcctggattagggtaggccctaggtccactggcaggtgtgcttctcagggtctgaaaggggaagacagggccacccagaggaggagacggaggcagagacagggccacccagaggaggagacggaggcagagacagggccacccagaggaggagacggaggcagagacaggggccacccanaggaggagacggaggcagagacagggccacccagaggaggagacggaggcagagacagggccacccaaaggaggagacggaggcagaanacaggcccccccaaagaaganaccggaggcanaaaacagggccacccanaggaggagacggaggcanaaacagggccaccccaaaggaggagacggaggcaaaacagggccacccaaaaggaggaagccggaaggaaaaaacagggcccccccaaaggaggaagncggagggcnaaaaanagggccccccccaaagngagaaaaccnggnaggcnanaaaaccnggggcccnnc

SEQ ID NO: 696 - DNA, 317 bp, Homo sapien
  misc_feature (1)...(317): n = A,T,C or G
tgacccgttntttctgcaaaggagagtggggaaggagggntgggaagacaaaagttacatgttagcagggaagagaacagaattttatccacccttatctctttagtgagtgaacaaacagcccactgtcatcgtggatacatttcacttttttcacatgactaaggagctctccggagtgaagagtgagtaaatatgtttattacgcattcatttgctaagaatcatcaagaacccaaagttagagacgtttcgtggttgaactttctccctactgtctagtagaattatatggggattctggatctgctggtgcc

SEQ ID NO: 697 - DNA, 246 bp, Homo sapien
  misc_feature (1)...(246): n = A,T,C or G
ctncagctctaatcgactnctatnaggnatgatggcncgtgcngcgcgtacgtantgcttggatcctcnnanagcggacgcctactactactaaattcgcggncgcgttgactttttttgtttttttccttnacagagntntttttgtgcccttggttcttatgctcanactcngcaaaaaanatcaaaagntacnnatgaaaaacntatnccatctncanaaaggaggtgnagntattactttct

SEQ ID NO: 698 - DNA, 3674 bp, Homo sapien
agaaagtttccttttttttttttaatggtgaaaagatatacacatatttagaattagccagctgggctcagtttagattattccaattttgttggcaacatccagagcatcgtaatcaggagccagtgaaacatattccttcttctctccatcaggccaaatcacggtgttgaccttggccacatcaatgtcttagaacttcttcacagcctgtttgatctggtgcttgttggctttaacatccacaatgaacacaagtgtgttgttgtcttctatcttcttcgtggtgactcagtggtcagcggaaacttgatgatagcgtagtggtcaagcttgtatctcctgggagcgctcttccaaagatatttgggctgcctcgggagttgcagcgtcttgggccgccggaaggtgggtgacgtacggatcttctttttttgtgtggctgtggacacctttcaacactgtcttcttggcctttaaatccttcgctttggtttcggctataggaggggcaggagcttccttcttcactttcggcgccatcttgtgaaaagggaaagtttcctttctaataccattttcacttctcccgaattttgtggatcgtttcttggtatctaccccagatttcaggagtgttggctggatcttagggattgtgaagtcttcatttccctgtggtgagatctgaggcatgattttaaacagtgtgagggaaggagatctccaggcactttaatagaatggagaagcaggatgggatttgagaggaaatctgattttgaaaaaaggagaactagagttgagttcgtaattaactagcaccttaaaggtcattcagcatgcccatctgcacagtgggtgtaatcaccctacagaacaaaaacaaaaaggcaatggagaggaagctgtaaagcactgtacatgtttaactcattgttatgtaagctagccgaaggcttcacagacttgaattcatctcccaagttctcttcctgtactggaaactctgccttaggttgcttaaaacttgagaaacagaatattgcttcccctgcctgccttcttgagtacacttgcctacacaaagatgcacatccttgtttgtgtgtgtgtgtccatttgctgtgacattcttgtgaaagtcaaagtttcccagctgttgacatacacaagtttgtttggtgcaacctgtcagatgcatcccttagacaggccctttgatactctgggaaagacattggacttacagtcggaacgaaaagaaagaaatgtgatatgtatagcgtgcagtgagttggagttttacctgtattgttttaatttcaacaagcctgaggactagccacaaatgtacccagtttacaaatgaggaaacaggtgcaaaaaggttgttacctgtcaaaggtcgtatgtggcagagccaagatttgagcccagttatgtctgatgaacttagcctatgctctttaaacttctgaatgctgaccattgaggatatctaaacttagatcaattgcattttccctccaagactatttacttatcaatacaataataccacctttaccaatctattgttttgatacgagactcaaatatgccagatatatgtaaaagcaacctacaagctctctaatcatgctcacctaaaagattcccgggatctaataggctcaaagaaacttcttctagaaatataaaagagaaaattggattatgcaaaaattcattattaatttttttcatccatcctttaattcagcaaacatttatctgttgttgactttatgcagtatggccttttaaggattgggggacaggtgaagaacggggtgccagaatgcatcctcctactaatgaggtcagtacacatttgcattttaaaatgccctgtccagctgggcatggtggatcatgcctgtaatctcaacattggaaggccaaggcaggaggattgcttcagcccaggagttcaagaccagcctgggcaacatagaaagaccccatctctcaatcaatcaatcaatgccctgtctttgaaaataaaactctttaagaaaggtttaatgggcagggtgtggtagctcatgcctataatacagcactttgggaggctgaggcaggaggatcactttagcccagaagttcaagaccagcctgggcaacaagtgacacctcatctcaattttttaataaaatgaatacatacataaggaaagataaaaagaaaagtttaatgaaagaatacagtataaaacaaatctcttggacctaaaagtatttttgttcaagccaaatattgtgaatcacctctctgtgttgaggatacagaatatctaagcccaggaaactgagcagaaagttcatgtactaactaatcaacccgaggcaaggcaaaaatgagactaactaatcaatccgaggcaaggggcaaattagacggaacctgactctggtctattaagcgacaactttccctctgttgtatttttcttttattcaatgtaaaaggataaaaactctctaaaactaaaaacaatgtttgtcaggagttacaaaccatgaccaactaattatggggaatcataaaatatgactgtatgagatcttgatggtttacaaagtgtacccactgttaatcactttaaacattaatgaacttaaaaatgaatttacggagattggaatgtttctttcctgttgtattagttggctcaggctgccataacaaaataccacagactgggaggcttaagtaacagaaattcatttctcacagttctgggggctggaagtccacgatcaaggtgcaggaaaggcaggcttcattctgaggcccctctcttggctcacatgtggccaccctcccactgcgtgctcacatgacctctttgtgctcctggaaagagggtgtgggggacagagggaaagagaaggagagggaactctctggtgtctcgtctttcaaggaccctaacctgggccactttggcccaggcactgtggggtggggggttgtggctgctctgctctgagtggccaagataaagcaacagaaaaatgtccaaagctgtgcagcaaagacaagccaccgaacagggatctgctcatcagtgtggggacctccaagtcggccaccctggaggcaagcccccamagagcccatgcaaggtggcagcagcagaagaagggaattgtccctgtccttggcacattcctcaccgacctggtgatgctggacactgcgatgaatggtaatgtggatgagaatatgatggactcccagaaaaggagacccagctgctcaggtggctgcaaatcattacagccttcatcctggggaggaactgggggcctggttctgggtcagagagcagcccagtgagggtgagagctacagcctgtcctgccagctggatccccagtcccggtcaaccagtaatcaaggctgagcagatcaggcttcccggagctggtcttgggaagccagccctggggtgagttggctcctgctgtggtactgagacaatattgtcataaattcaatgcgcccttgtatccctttttcttttttatctgtctacatctataatcactatgcatactagtctttgttagtgtttctattcmacttaatagagatatgttatacttaaaaaaaaaaaaaaaaa

SEQ ID NO: 699 - DNA, 2051 bp, Homo sapien
  misc_feature (1)...(2051): n = A,T,C or G
ggaccaggggctgaagtgaacccccagcacagcacagctgctctataaaaacgtggccagacttttttttttgaagcaagtccctgttcttgttcgtcctgactagtcccatcagggccctggatcccaagactcagcatccaaggtcccctccaggaatcctggcagctcagcatactttatcctgtttcatctgagagcaaaaatgtaaaattggatgcacagaaaagtgactcaaagtgcttaatgactagaagaaatctaggagcagcaagaagagcaggacaaacaggccaggcggtgtcaggagcccaggtctccagctgganggaacgtcaaccctgcagtgggagcaggggccctttgcacatcctaggcacagatggtaatgtagacaccacaggtaagctgggcttggtacctacccctccccggattcagaaagaaaccaaacaaggagctttgtgtggaatgaaacctcctttcctcccagaagcactgctgactgtttggtggttgccatttgtggcagtgagcccttgtttgttctgaggttgggctggtttctcctcttggccctgccctacagatcataaaggagaacagcaagacgtccccagcaaacatccacagatggccttggaaataagtcaccttcctcaccctgcaggaatgccagtgaacatattgctgacatcttggagctcagtacctcatagtgtaacggcgtcagtagatctgcctgtgctgggacttcctgtactacccattcctgaggggcgatgcttctgcagggcctgtgacttggtgcacaacttcagacaccatcatcttgcagcagcaccgcaccctcactagccagggtgttgatgacttcctcaaggccaaggccacattcaaggcttcggacttcattgatgcgcttgtgctgagcaaggtggcttctccgggatcttaattcaggaggtagaatggagcttgagatcaagtgtctgatcaagcctcagtgtatgggcgctgttcatcctctggtgctgaagcagccaagagacccaagtctgcctggctgcctcttaggatatgacagcagagccagtggcctctactagatcctgtacaacctcacaaaacacccagacatcgggagtgctgccagcctgtgatgcaagagtcctaatcctgaagacattgaatgacctgtcgttgtgctgtttttaccaaaaaggatcatgaggatcagagaggaaaagtcacttgcccaaagtcacacagctgaacagtggtggagttcaactttgaccgtgggctgtctggcccccaaggtgtatgcttgcttctctcccaagagactcctttcttatcaggctcaaatgaatgaaaggaggatgttaaagacaacgccattattgacgagatcactcccaagcggattggagattgtcccaatatttagacctatagcaaggccttgggagaaatggtggtgcagcaggagagcaggaacctaaccattgccatcctaaggccctccattgtgtggagcaacgtggcaccagcttttcctgggttgggttgataatctaaatggatgtagccgactcattattgcggtatgtatagggatgaagaagtaactgtaatgtagtggaggaatagtaagaaaattcttagtgctggcttagcttaattgatccaaaaacataaatgctactttactatcaattgaagcatattatttcaattattctggttataatatggaggcaggatgaaattgtttttattcttttagaatttttttttatcaggaaaacagaggtaaagtgctatcaattactatttaagagttctattttgaaaagtgagaattaaggatttttcttttctttttaaaaaaaacttttttaaaaattaaaaataaaagaagcaaaagtcttaggaaaatgaagcaagtagccctgccactctatgtacagtaataacaatatctgtcccagttattatgtacaatattataaaaaatgtcgcagacagtaaaaaaaaaaaaaaaa

SEQ ID NO: 700 - DNA, 2841 bp, Homo sapien
  misc_feature (1)...(2841): n = A,T,C or G
gcagagcacagcatagctgctttaccaaatcatggccagactgcttctgtaagcaggcccctgatcctgttccacctcactggacaggacctcccaactggggcctccagctacccccaccagcatcccttggccaatggaaatttgaaatgttcctgggacagagctcctggagagaggggcaggccaccacctttgctgtttgggtgactagccgttctggcctgcaggctttggagagcccaagctgacaaggggtagaagaggtgcctcagcacagcacagccacgctacgaaaacatggccagactcttgtttaagtcagtccccgaacacatttctagtcagtgggtgaagtctttcaaccagggtctctggctaccttgactgctgttctctggccgacagaggtctcaggcctccctgagtcagagctcccggggggaggaccagattgtcatctttgctgtttgggtgacccagccatttcagccttagggcttcagagtgtctgaggtagccaggggctgaagtgaacccccagcacagcacagctgctgtataaaaacgtggccagactttttctttaagcaagtccctgttcttattcctcctgactaggtaagacttctcaacttgcctccagccacatcttattggtgtgttcagattggcaacaggtttgtacctcagtggtacagagctcccagaggaaggggtaggctatcatcttccctggaaaatacgagtcaattagggacttgaggggacccccagcattccacagcagcccttcagaaaagtggccagactctgtacttgatgggcagatcctcctggcctgtgtctctagccagcccaccactggagctatcaagccagtagcaactcagcagttccttggacagagcttccaggagcaaatgaaatcctttctgccactgcctttgcagtgaactgcccttgctatcctcagaagatatatcacgggagcaaagaccctaagtgccatatcaacacctccaataagctgcagttgacccaaagaacaagccaatccatctcccacaggttccacacacactccactactcatcaccagacagggaaccctggcttgggcccacagcacagaccctccatcctgggccgattacactgagtgattgctaactcacatgtctctgggatggagcacccaggagacaagcaaagtggtggagcagcaagtcaggtgatgtggagcccagagggcagggagagctatctctctgggctccacttgcccttgtgagacactttgtcccagcactccttagtctgcttgcctctcccagggccccagcctggccacacctgcttacagggcactctcagatgcccataccatagtttctgtgctagtggaccgtaccatatcagtggagagctgcagcaaggtggcccntacggccacgcaccagcctgcacattacctctccatactgcagccctttatatggaaacttcctacatcactttgctgtgtgtgtttacacaggtggattttgctttacttgcactgacagcacacaggagggcagcacacaccccaacccacatcaactgccattaaagaaaagaaatttcagcccataatttcatgtccagcaaaattaggcatcataagtgaaggagaaataagatccttttcagacaagcaaatgctgagggaattcaatatcaccagatctaccttacaagagctcctgaaggaagcactaaatatggaaagaaaaaaccatcaccagccactacaaaaatgcagtgaagaacgcagtgaattacgcagtccagtgatgctaaaaaccaaccacatacgttaagtctgcaaaataaccagctgacagcatgacgacaggataaatccacacataccattactaaccttaaatgaaaatgggctaaatgctcccattgaaagacatggggcaagctggataaagaaccaagacccactggagtatgctgtcttcaagaaacccatctcacatgcggtggcatacataggctcaaaataaaggaatggagaaaaatatttcaagcaaatggaaaacagaaaaaagcaggtgttgcactcctactttctgacaaaacagactatgcgaataaagataaaaaagagaaggacattacaaaggtggtcctgacctttgatatatctcattgcttgataccaacctgggctgttttaattgcccaaanccaataggataatttgctgaggttgtggagcttctcccctgcagagagtccctgatctcccaaaatttggttgagatgtaaggttgattttgctgtacaactccttttctgaagttttactcatttccaaaaaggaaggcaagttttcctgcttccatgacgatggagagcaggcatctcctttcctgagtttcagcttgcttctgacagggaaggtgagtgtaagttttttccagcttctaagatggcagagaacgatcaccagcctgagccttatttccaggtaagtagctgaattagagttttgtcttaaaatttttccttaatgattaaaatgtaagattacccaccagctgcttttaatttctcccttagcattagaacactcagtaatcatatgaattgtgcatttgtttgttttgcttaactctttctgtttgtttatgtttggggttttattgttgttgtttcacttttctcccatctcttcctgacttggtcaaatccaaaggaatgttcgaaattgtggggagcaaggcatctgaaatggctaaaactcctgtggctgcaaaaaatagaaataaaaaaaaaaaaaaa

SEQ ID NO: 701 - DNA, 3218 bp, Homo sapiens
  misc_feature (1)...(3218): n = A,T,C or G
tccgccccattgacgcaaatggcggtaggcgtgtacggtgggaggtctatataagcagagaactagagaacccactgcttactggcttatcgaaattaatacgactcactatagggagacccaagctggctagcgtttaaacttaagcttggtaccgagctcggatccactagtccagtgtggtggaattccattgtgttgggcaggaaacaagcaaagtggtggagcagcaagtcaggtgatgtggagcccagaggtcagggatggctgtctctctagggtccacttgcccttgtgagacactttatcccagcactttaggaatactgaggtcataccagccacatcttatatgcaagattgcccagcagagatcaggtccgagagttccctttttaaaaaaaggagacttgcttaataaaagaagtctagccacgtttgtgtagagcggctgtgctgtgctgggggttcacttttgagagagttctcctctgagacctgatctctggaggctgggcaatcttgcacttgagatggggctggtctgatctcagcactccttagtctgctcgcctctcccatggccccagcctggccacacctgcttacggggcactcttagatgcccacaccataacttccatgctagtggactgtaccatatcagtggagagctgcagcaaggtggcccctagagccacgcaccagcctgcacattgcctctccatacggcagccctttatttggaaacttcctaaatcactttgctgtgtgtgtttacacgggtgtgttttgctttacttgccctgagagcacacgggagtgcagcacacaccccaacccacatcaactgccattaaagaaaagaaatttcagcccagaatttcatgtccagcaaaattaagcatcataagtgaaggagaaataagatccttttcagacaagcaagtgctgagggaatttggtatcaccagatctaccttacgagagctcctgaaggaagcactaaatatggaaagaaaagatcatcacctgctactacaaaaacacactgaagtacacagtccaatgatgctaaaaagcaagcacatatgtaagtctgcaaaataaccagctgacagcatgacgacaggataaaatccacacataccattactaaccttaaatgtaaatgggctaaatgctcccattgaaagacacggggcaagctgggtaaagaaccaagacccactggagtatgccgtcttcaagcaacccatctcacgtgcagtgccatacataggctcaaaataaaggaatggagaaaaatatttcaagcaaatggaaaacagaaaaaaggtgttgcactcccagtttctgacaaaacagactctaccaataaagataaaaaaagagaaggacattacaaaggtggtcctgacctttgataaatctcattattgcttgataccaacctgggctatttgtattgcccaaacgaataggataatttgctgaggttgtggagcttctccccttcacagagtccctgatctccgaaaatttggttgagatgtaaggttgattttgctgtacaactccttttttgaagttttactcatttccaacaaggaaggcaagttttcctgcttccattgacaaaggagagcaggcacctcctttcctgagtttcagcttgcttctgacagggaaggagctttgagatttgaatactggcctgctgggttttggacgtgcattgggcctgtggtcccatttgtgttatttttctgggaaatttcttccctttggagtgagaaagcttacccaatgcctgtaccatcatcgtaccttaaaagaactccattttaagttcagggactccttggcagaagagaccgtagccttgtatcagatcataaaggagaagagcaagaggtccccggcaaacatccacagatggccttggaaataagtcaccttgctcaccctgcaggaatgccagtgaacttattgctgacatcttggagctcagtaccctcatagtgtaacggcgtcagcagatctgcctgtgctgggacttcctgtactacccattcctgaggggcgatgcttctgcagggcctgtgacttggtgcacaacttcagacaccatcatcttgcagcagcaccgcaccctcactagccagggtgttgatgacttcctcaaggccaaggccacattcaaggcttcggacttcattgatgcgcttgtgctgagcaaggtggcttctccgggatcttaattcaggaggtagaatggagcttgagatcaagtgtctgatcaagcctcagtgtatgggcgctgttcatcntctggtgctgaagcagccaagagacccaagtctgcctggctgcntcttaggatatgacagcagagccagtggcctctactagatcctgtacaacctcacaaaacacccagacatcgggagtgctgccagcctgtgatgcaagagtcctaatcctgaagacattgaatgacctgtcattctgctgtttttaccaaaaaggatcatgaggatcagagaggaaaagtcacttgcccaaagtcacacagctgaacagtggtggagttcaactttgaccgtgggctgtctgaccccaaggtgtatgcttgcttctctcccaagagacaactttcttatcaggctcaaatgaatgaaaggaggatgttaaaggtaggatctctgaagcctgtgccagtggaaccgcagctcatggctggcacctgtgttctcattcttacctcattaagagtaaagtttattgagtttattgaatttaagtatctttagtgagatcatatattattagtaagaactgggaccaaacagattttctgactctaaaagagagattttcacagaaacagatatatacctgtaagtatacagacacgcatacacacatttctttactgctcataaaaattagtccttattagaatgtgggatgtataaatgtaagagaattttcatgttaaaattgacagatacatttttaaattgtcctaaaataaatttaattatttttnttttagaattttccattattaatgttatttttatgagaaactatataactttattgataatacatacaataaccctttgtttttcaaattgaaaatacagtgtattttgcaaataactaagtcctaattttgtattaaaattttaaattttcaaaaaaaaaaa

1. A fusion protein comprising a P501S polypeptide sequence encoded by at least 75 consecutive nucleotide residues of SEQ ID NO: 110, and further comprising an unrelated fusion partner.

2. A fusion protein according to claim 1, wherein the P501S polypeptide sequence is encoded by at least 150 consecutive nucleotide residues of SEQ ID NO: 110.

3. A fusion protein according to claim 1, wherein the P501S polypeptide sequence is encoded by at least 300 consecutive nucleotide residues of SEQ ID NO: 110.

4. A fusion protein according to claim 1, wherein the P501S polypeptide sequence comprises residues 36-553 of the amino acid sequence encoded by SEQ ID NO: 110.

5. A fusion protein according to claim 1, wherein the P501S polypeptide sequence comprises residues 36-325 of the amino acid sequence encoded by SEQ ID NO: 110.

6. A fusion protein according to claim 1, wherein the P501S polypeptide sequence comprises residues 257-553 of the amino acid sequence encoded by SEQ ID NO: 110.

7. A fusion protein according to claim 1, wherein the P501S polypeptide sequence comprises residues 355-526 of the amino acid sequence encoded by SEQ ID NO: 110.

8. A fusion protein according to claim 1, wherein the fusion partner comprises an expression enhancer that increases expression of the fusion protein in a host cell transfected with a polynucleotide encoding the fusion protein.

9. A fusion protein according to claim 1, wherein the fusion partner comprises a T helper epitope.

10. A fusion protein according to claim 1, wherein the fusion partner comprises an affinity tag.

11. A fusion protein according to claim 1, wherein the fusion partner comprises an amino acid sequence derived from a protein selected from the group consisting of protein D, NS1, and LYTA.

12. A fusion protein according to claim 1, wherein the fusion partner comprises an amino acid sequence derived from a protein selected from the group consisting of Ra12 and thioredoxin.
